(19) United States
(12) Patent Application Publication
(10) Pub. No.: US 2021/0171929 A1
(43) Pub. Date: Jun. 10, 2021

(54) SINGLE BASE EDITING TOOLS WITH PRECISE ACCURACY

(71) Applicant: William Marsh Rice University, Houston, TX (US)

(72) Inventors: Xue GAO, Houston, TX (US); Sangsin LEE, Houston, TX (US); Ning DING, Houston, TX (US)

(73) Assignee: William Marsh Rice University, Houston, TX (US)

(21) Appl. No.: 17/104,562

(22) Filed: Nov. 25, 2020

Related U.S. Application Data
(60) Provisional application No. 62/940,017, filed on Nov. 25, 2019.

(51) Int. Cl. C12N 9/78; C12N 9/22; C12N 15/11; C12N 15/90

(52) U.S. Cl. CPC C12N 9/78; C12Y 305/04001; C12N 9/22; C12N 15/11; A61K 38/00; C12N 2800/80; C12N 2310/20; C07K 2319/00; C12N 15/907

(57) ABSTRACT

Provided herein are systems, reagents, methods, and kits that are useful for the targeted editing of nucleic acids, including editing a single site within the genome of a cell or subject, e.g., within the human genome. In some embodiments, fusion proteins of Cas9 and cytosine deaminase domains, are provided. In some embodiments, methods for targeted nucleic acid editing are provided.

### REFERENCE TO RELATED APPLICATIONS

[0001] The present application claims the priority benefit of U.S. provisional application No. 62/940,017, filed Nov. 25, 2019, the entire contents of which is incorporated herein by reference.

### REFERENCE TO A SEQUENCE LISTING

[0002] The instant application contains a Sequence Listing, which has been submitted in ASCII format via EFS-Web and is hereby incorporated by reference in its entirety. Said ASCII copy, created on Nov. 12, 2020, is named RICEP0071US_ST25.txt and is 855.3 kilobytes in size.

### BACKGROUND

### 1. Field

[0003] The present invention relates generally to the fields of molecular biology and medicine. More particularly, it concerns fusion proteins for the targeted conversion of cytosine nucleotides to thymine nucleotides and methods of using said fusion proteins to edit nucleic acids and treat disease.

### 2. Description of Related Art

[0004] Nucleobase editing technology enables conversion of cytosine (C) to thymine (T) on a specific DNA target (see, e.g., U.S. Pat. No. 10,167,457). The base editors used in this technology comprise (1) an RNA-programmable DNA-targeting protein (i.e., Cas9), (2) a guide RNA that directs the DNA-targeting protein to the intended target site, and (3) a cytosine deaminase enzyme that converts the target C to uridine (U), which is then converted to T by the endogenous cellular repair pathway. All existing base editors have a defined activity window size, typically 5-nucleotides, within the DNA target region, which defines the range of Cs the base editor can cover to convert to Ts. Any Cs positioned within this window could be converted to T, including any non-target Cs, thus leading to unwanted C-to-T byproducts. Researchers have tried decreasing the window size to reduce such byproducts, but this strategy greatly limits the targeting scope of base editors because it allows only a particularly preferable position of C within the window to be converted, leaving Cs located on the other non-preferable positions, which might be the actual main target, to be non-targetable.

### SUMMARY

[0005] In one embodiment, provided herein are polypeptides comprising a variant of a native cytosine deaminase (CD) domain, wherein the variant CD domain comprises a sequence at least 90%, at least 95%, at least 98%, or 100% identical to amino acids 198-384 of SEQ ID NO: 48, and comprises P200A, N236A, P247K, Q318K, Q322K substitutions relative to SEQ ID NO: 48. In some aspects, the polypeptides further comprise a Y315F or a N244G substitution relative to SEQ ID NO: 48. In some aspects, the polypeptides further comprise H248N, K249L, H250L, G251C, F252G, L253F, and E254Y substitutions relative to SEQ ID NO: 48. In some aspects, the polypeptides further comprise a Y315F substitution relative to SEQ ID NO: 48. In some aspects, the polypeptides further comprise a D316H substitution relative to SEQ ID NO: 48, a reversion back to proline at position 247 of SEQ ID NO: 48, or a reverse back to glutamine at position 318 of SEQ ID NO: 48. In some aspects, the polypeptides further comprise a E217K, T311A, or R210L substitution relative to SEQ ID NO: 48. In some aspects, the polypeptides further comprise T311A and R320L substitutions relative to SEQ ID NO: 48. In some aspects, the polypeptides further comprise a E217K substitution relative to SEQ ID NO: 48. In some aspects, the polypeptides further comprise a N244Q, S286A, D316E, R313A, Y315F, S286A, N244G, W285Y, R320E, D316R, D317R, Y315L, or Y315W substitution relative to SEQ ID NO: 48.

[0006] In some aspects, the polypeptides further comprise L234K, F310K, C243A, C321A, and C356A substitutions relative to SEQ ID NO: 48. In some aspects, the polypeptides further comprise a Y315F substitution relative to SEQ ID NO: 48. In some aspects, the polypeptides further comprise a W285Y, W285F, R320A, R320E, or R326E substitution relative to SEQ ID NO: 48. In some aspects, the polypeptides further comprise an R320E substitutions relative to SEQ ID NO: 48.

[0007] In some aspects, the CD domain is a chimpanzee, gorilla, monkey, cow, dog, rat, mouse, or human APOBEC3G deaminase domain. In some aspects, the polypeptides further comprise a Cas9 domain that has nickase activity. In some aspects, the Cas9 domain is Streptococcus pyogenes Cas9 (SpCas9), Staphylococcus aureus Cas9 (SaCas9), Cas9-VQR, Cas9-VRER, SaCas9, StCas9, NmCas9, CjCas9, CasX, CasY, Cpf1, C2c1, C2c2, or C2c3. In some aspects, the Cas9 domain is a Streptococcus pyogenes Cas9 (SpCas9) having a D 10A substitution. In some aspects, the Cas9 domain is positioned at the C-terminus of the CD domain. In some aspects, the Cas9 domain comprises a sequence at least 90%, at least 95%, at least 98%, or 100% identical to amino acids 435-1801 of SEQ ID NO: 3.

[0008] In some aspects, a linker is positioned between the CD domain and the Cas9 domain. In some aspects, the linker is a 32 amino acid GSSG linker. In some aspects, the linker comprises a sequence of amino acids 403-434 of SEQ ID NO: 3. In some aspects, the linker is a 3 amino acid PAP linker. In some aspects, the linker is a 7 amino acid repetitive proline-alanine (PA) linker. In some aspects, the linker is a 9 amino acid repetitive proline-alanine (PA) linker. In some aspects, the linker is a 15 amino acid repetitive proline-alanine (PA) linker.

[0009] In some aspects, the polypeptides further comprise a uracil glycosylase inhibitor (UGI) domain. In some aspects, the UGI domain is positioned at the C-terminus of the Cas9 domain. In some aspects, the UGI domain comprises a sequence at least 90%, at least 95%, at least 98%, or 100% identical to amino acids 1812-1987 of SEQ ID NO: 3. In some aspects, a linker is positioned between the Cas9 domain and the UGI domain. In some aspects, the linker comprises a sequence of amino acids 1802-1811 of SEQ ID NO: 3.

[0010] In some aspects, the polypeptides further comprise a nuclear localization sequence. In some aspects, the nuclear localization sequence is a bipartite nuclear localization sequence.

[0011] In one embodiment, provided herein are nucleic acids comprising a nucleotide sequence encoding the polypeptide of any one of the present embodiments. In some aspects, the nucleic acid is codon optimized for expression in bacteria, fungus, insects, or mammals. In some aspects, the nucleic acid is codon optimized for expression in a human cell.

[0012] In one embodiment, provided herein are expression vectors comprising the nucleic acid of any one of the present embodiments. In some aspects, the nucleotide sequence encoding the polypeptide is operably linked to a first expression control element. In some aspects, the expression vectors further comprise a nucleotide sequence encoding a guide RNA (gRNA). In some aspects, the nucleotide sequence encoding the gRNA is operably linked to a second expression control element.

[0013] In one embodiment, provided herein are host cells comprising the nucleic acid of any one of the present embodiments. In some aspects, the host cell is a bacterial cell, a fungal cell, an insect cell, or a mammalian cell. In some aspects, the host cell is a human cell.

[0014] In one embodiment, provided herein are pharmaceutical formulations comprising the nucleic acid of any one of the present embodiments in a pharmaceutically acceptable carrier.

[0015] In one embodiment, provided herein are viral vectors comprising the nucleic acid of any one of the present embodiments. In some aspects, the viral vector is an adeno-associated viral (AAV) vector, a lentiviral vector, or a retroviral vector. In some aspects, the viral vector further comprises a nucleotide sequence encoding a guide RNA (gRNA). In some aspects, the nucleotide sequence encoding the gRNA is operably linked to a second expression control element. In some aspects, the first and/or second expression control element comprises a promoter. In some aspects, the first and/or second expression control element comprises an enhancer element. In some aspects, the viral vectors further comprise one or more of an intron, a filler polynucleotide sequence, and/or poly A signal.

[0016] In one embodiment, provided herein are compositions comprising the nucleic acid of any one of the present embodiments and a nucleic acid encoding a guide RNA. In some aspects, the gRNA comprises a fusion of a CRISPR-RNA (crRNA) and a trans-activating CRISPR RNA (tracrRNA). In some aspects, the gRNA comprises a crRNA and a tracrRNA. In some aspects, the gRNA is a 5′ extended gRNA. In some aspects, the nucleic acid encoding the guide RNA is codon optimized for expression in bacteria, fungus, insects, or mammals. In some aspects, the nucleic acid encoding the gRNA is codon optimized for expression in a human cell. In some aspects, the nucleotide sequence encoding the polypeptide is operably linked to a first expression control element. In some aspects, the nucleotide sequence encoding the gRNA is operably linked to a second expression control element. In some aspects, the first and/or second expression control element comprises a promoter. In some aspects, the first and/or second expression control element comprises an enhancer element.

[0017] In one embodiment, provided herein are compositions comprising the polypeptide of any one of the present embodiments and a guide RNA bound to the Cas9 domain of the polypeptide. In some aspects, the gRNA comprises a fusion of a CRISPR-RNA (crRNA) and a trans-activating CRISPR RNA (tracrRNA). In some aspects, the gRNA comprises a crRNA and a tracrRNA. In some aspects, the gRNA is a 5′ extended gRNA.

[0018] In one embodiment, provided herein are methods for targeted modification of a selected DNA sequence, the method comprising contacting the DNA sequence with a polypeptide of any one of the present embodiments and a nucleic acid comprising a guide RNA (gRNA) sequence targeted to the selected DNA sequence, where the gRNA complexed with the polypeptide and directs the polypeptide to the selected DNA sequence. In some aspects, targeted modification is the deamination of a deoxycytidine within the selected DNA sequence. In some aspects, the selected sequence comprises a CC motif. In some aspects, the targeted modification is the deamination of the second deoxycytidine within the CC motif. In some aspects, the selected sequence comprises a DCYD motif, wherein D represent A, G, or T, and wherein Y denotes the T>C mutation. In some aspects, the selected sequence comprises a DCCYD motif, wherein D represent A, G, or T, and wherein Y denotes the T>C mutation. In some aspects, the selected sequence comprises a CCCA motif, wherein the targeted modification is the deamination of the third deoxycytidine within the motif.

[0019] In some aspects, the introducing comprises introducing into the cell a nucleic acid encoding the polypeptide, and wherein the method further comprises maintaining the cell under conditions in which the nucleic acid encoding the polypeptide is expressed. In some aspects, the contacting is in vitro. In some aspects, the contacting is in vivo in a subject identified as having a clinical condition. In some aspects, the selected DNA sequence is associated with the clinical condition, and wherein deamination of the cytidine results in a sequence that is not associated with the clinical condition. In some aspects, the clinical condition is hereditary pyropoikilocytosis, cystic fibrosis, or holocarboxylase synthetase deficiency. In some aspects, the deamination corrects a point mutation in the selected DNA sequence associated with the clinical condition. In some aspects, the selected DNA sequence comprises a T to C point mutation associated with the clinical condition, and wherein the deamination of the mutant C base results in a sequence that is not associated with a disease or disorder. In some aspects, the selected DNA sequence encodes a protein, and wherein deamination of the nucleotide base results in a correction of a T to C point mutation to restore the wild-type sequence of the encoded protein.

[0020] As used herein, “essentially free,” in terms of a specified component, is used herein to mean that none of the specified component has been purposefully formulated into a composition and/or is present only as a contaminant or in trace amounts. The total amount of the specified component resulting from any unintended contamination of a composition is therefore well below 0.05%, preferably below 0.01%. Most preferred is a composition in which no amount of the specified component can be detected with standard analytical methods.

[0021] As used herein the specification, “a” or “an” may mean one or more. As used herein in the claim(s), when used in conjunction with the word “comprising,” the words “a” or “an” may mean one or more than one.

[0022] The use of the term “or” in the claims is used to mean “and/or” unless explicitly indicated to refer to alternatives only or the alternatives are mutually exclusive, although the disclosure supports a definition that refers to only alternatives and “and/or.” As used herein “another” may mean at least a second or more.

[0023] Throughout this application, the term “about” is used to indicate that a value includes the inherent variation of error for the device, the method being employed to determine the value, the variation that exists among the study subjects, or a value that is within 10% of a stated value.

[0024] Other objects, features and advantages of the present invention will become apparent from the following detailed description. It should be understood, however, that the detailed description and the specific examples, while indicating preferred embodiments of the invention, are given by way of illustration only, since various changes and modifications within the spirit and scope of the invention will become apparent to those skilled in the art from this detailed description.

### BRIEF DESCRIPTION OF THE DRAWINGS

[0025] The patent or application file contains at least one drawing executed in color. Copies of this patent or patent application publication with color drawing(s) will be provided by the Office upon request and payment of the necessary fee.

[0026] The following drawings form part of the present specification and are included to further demonstrate certain aspects of the present invention. The invention may be better understood by reference to one or more of these drawings in combination with the detailed description of specific embodiments presented herein.

[0027] FIG. 1. Graphical representation of the results of testing the C-to-T editing abilities of the engineered A3G base editors on the GCCCA motif in the HEK3 site.

[0028] FIG. 2. Graphical representation of the results of testing the C-to-T editing abilities of the engineered A3G base editors on the ACCA motif in the HEK4 #a2 site.

[0029] FIG. 3. Graphical representation of the results of testing the C-to-T editing abilities of the engineered A3G base editors on the TCCA motif in the EMX1 #2 site.

[0030] FIG. 4. Graphical representation of the results of testing the C-to-T editing abilities of the engineered A3G base editors on the TCCA motif in the RNF2 #2 site.

[0031] FIGS. 5A-5C. Graphical representation of the results of testing the C-to-T editing abilities of the engineered A3G base editors on the GCCT motif in the BSC1L #1 site, the ACCT motif in the PPP 1R12C #a2 site, and the TCCT motif in the EMX1 #a3 site.

[0032] FIG. 6. Graphical representation of the results of testing the C-to-T editing abilities of the engineered A3G base editors on the ACCA motif in the AMX1 #a10 site.

[0033] FIG. 7. Graphical representation of the results of testing the C-to-T editing abilities of the engineered A3G base editors on the GCCG motif in the FANCF #a3 site.

[0034] FIG. 8. Graphical representation of the results of testing the C-to-T editing abilities of the engineered A3G base editors on the GCCG motif in the EMX1 #a18 site.

[0035] FIG. 9. Graphical representation of the results of testing the C-to-T editing abilities of the engineered A3G base editors on the GCCG and ACCA motifs in the FANCF #2 site.

[0036] FIG. 10. Graphical representation of the results of testing the C-to-T editing abilities of the engineered A3G base editors on the ACCG motif in the HEK4 #a1 site.

[0037] FIGS. 11-13. Graphical representations of the results of testing the C-to-T editing abilities of the engineered A3G base editors on the TCCG motif in the EMX1 site.

[0038] FIG. 14. Graphical representation of the results of testing the C-to-T editing abilities of the engineered A3G base editors on the ACACA motif in the HEK2 site.

[0039] FIG. 15. Graphical representation of the results of testing the C-to-T editing abilities of the engineered A3G base editors on the TCGCCG motif in the MSSK1-M-c site.

[0040] FIG. 16. Graphical representation of the results of testing the C-to-T editing abilities of the engineered A3G base editors on the TCCCT motif in the FANCF site.

[0041] FIG. 17. Graphical representation of the results of screening the base editing efficiency and specificity of engineered A3G-BE variants on the EMX1 and FANCF #a3 sites in HEK293T cells.

[0042] FIG. 18. Representation of the HTS analysis performed to quantify modified alleles for disease modeling and correction after treatment with BE4max, A3G-BE4.4, A3G-BE5.13, and A3G-BE5.14.

[0043] FIG. 19. A3G-BE5.13 with altered linkers.

[0044] FIG. 20. Graphical representation of the results of screening the base editing efficiency and specificity of engineered A3G-5.13 variants on the VEGF #2 and EMX1 PolyC #1 sites in HEK293T cells.

### DETAILED DESCRIPTION

[0045] The present process for base editing involves utilizing a different cytosine deaminase homolog, called APOBEC3G (or A3G), that has a unique native property of recognizing the ‘CC’ dinucleotide sequence motif on DNA. In the sequence context of two consecutive ‘CC,’ A3G has a preference to deaminate the latter C, thereby providing for the conversion of a single C-to-T when an immediate bystander C is present. To allow for precise discrimination between two or possibly more consecutive Cs for the induction of clean single C-to-T conversions without the generation of unwanted byproduct(s), A3G has been engineered herein to enhance its basal activity level and recover its native base editing preference for the ‘CC’ sequence motif. The overall enzymatic activity of the A3G engineered variants was increased by increasing its expression level as well as by introducing selected mutations in the A3G deaminase portion of the enzyme. In addition, residues that can be engineered to modulate the enzyme's sensitivity for ‘CC’ selectivity were identified. The engineered A3G base editors provided herein (see Table 1) allow for a clean C-to-T conversion in the presence of multiple consecutive Cs regardless of the size of the activity window.

[0046] APOBEC3G orthologs originating from chimpanzee, gorilla, monkey, cow, dog, rat, mouse, or other mammals may replace the human APOBEC3G deaminase portion of any base editor while harboring one or more corresponding mutations to those provided herein. Base editors using different cytidine deaminase enzymes that also perform single C-to-T conversions in the context of consecutive Cs is also contemplated.

[0047] The present engineered A3G base editors, in principle, can discriminate between two consecutive Cs (C₋₁ and C₀ in the DNA context of ‘C₋₁C₀’) when they are positioned within the base editing activity window. It can be used as a CRISPR-based genome editing tool to cleanly install a single C-to-T mutation on the target C₀ while leaving C₋₁ unmutated, making C₋₁T₀ the most likely outcome using the present engineered A3G base editors. If other base editors lacking the ‘CC’ preferential motif are used, T₋₁T₀, C₋₁T₀, and T₋₁C₀ would all have approximately the equal chance to be the outcomes. In case of more than two Cs, for example three consecutive ‘C₋₂C₋₁C₀’, it is important to note that the first and the second Cs (C₋₂C₋₁) constitute the ‘CC’ dinucleotide motif, and therefore C₋₁ would be converted to T while C₋₂ would not. The same principle applies to the second and third Cs (C₋₁C₀) in this context: C₀ would be converted to T while C₋₁ would not. As a result, in the context of three consecutive Cs, any combinations of C-to-T conversions on the positions of C₋₁ and C₀ could be possible, making ‘C₋₂T₋₁T₀,’ ‘C₋₂C₋₁T₀,’ ‘C₋₂T₋₁C₀,’ to be the highest possible outcomes. If other base editors lacking the ‘CC’ preferential motif are used, C₋₂ could also be converted to T, making ‘C₋₂C₋₁T₀,’ ‘C₋₂T₋₁C₀,’ ‘T₋₂C₋₁C₀,’ ‘C₋₂T₋₁T₀,’ ‘T₋₂C₋₁T₀,’ ‘T₋₂T₋₁C₀,’ and ‘T₋₂T₋₁T₀’ to be the all possible outcomes. As a general principle, the very first C in the sequence context of several consecutive Cs would not be converted to T when using the present engineered A3G base editors, while other base editors would also convert the very first C to T because they lack the ‘CC’ preferential motif. In addition, certain of the present engineered A3G base editors retain high editing efficiency at C₀ while having diminished activity at other positions falling within the activity window.

[0048] The C-to-T conversion rate also depends on the overall sequence context as well as the chromatin structure of the target DNA. For example, studies suggest the ideal preferential motif of A3G is ‘CCCA.’ The conversion rate of C-to-T could be much higher in this full ideal motif, while the result in the context of ‘CC’ dinucleotide motif may vary across different genomic sites depending on the nearby sequence context. The accessibility of the target DNA depending on its endogenous structure could also affect the conversion rate. For example, heterochromatin refers to tightly packed DNA structure. This could influence the accessibility of base editors to the target DNA and therefore influencing the C-to-T conversion rate.

[0049] The correction of genetic mutations associated with diseases requires high precision and accuracy. For example, the engineered A3G base editors can cleanly correct pathogenic T>C disease mutations when such point mutations are positioned within the context of a ‘DCYD’ or ‘DCCYD’ sequence motif, in which Y denotes the T>C mutation position and D denotes any nucleotide other than C (i.e., A, G, or T). For such therapeutic applications, the engineered base editors provided herein can be packaged into delivery vehicles such as lipofectamine, AAV vector, lentivirus, and others to treat cells for C-to-T conversions that are within the engineered enzyme's selectivity specifications.

TABLE 1
A3G Base Editor Variants

| | A3G | | | | |
|---|---|---|---|---|---|
| A3G-BE | codon- | | | | SEQ ID |
| Versions | optimized | A3G Domains | Backbone | A3G Specification/Mutation** | NO*** |
| hA3G-BE3 | x | NTD + CTD | BE3 | — | 1 |
| 1.1 | x | NTD + CTD | BE4 | — | 2 |
| 1.2 | x | NTD + CTD | BE4MAX | — | 3 |
| 2.1 | ∘ | NTD + CTD | BE4MAX | — | 4 |
| 2.2 | ∘ | NTD + CTD | BE4MAX | N244G | 5 |
| 2.3 | ∘ | NTD + CTD | BE4MAX | Y315F | 6 |
| 3.1 | ∘ | NTD + CTD | BE4MAX | (P200A + N236A + P247K + | 7 |
| | | | | Q318K + Q322K) | |
| 3.2 | ∘ | NTD + CTD | BE4MAX | (P200A + N236A + P247K + | 8 |
| | | | | Q318K + Q322K) + (N244G) | |
| 3.3 | ∘ | NTD + CTD | BE4MAX | (P200A + N236A + P247K + | 9 |
| | | | | Q318K + Q322K) + (Y315F) | |
| 4.1 | ∘ | NTD + CTD | BE4MAX | (P200A + N236A + P247K + | 10 |
| | | | | Q318K + Q322K) + (A3A loop3) | |
| 4.2 | ∘ | NTD + CTD | BE4MAX | (P200A + N236A + P247K + | 11 |
| | | | | Q318K + Q322K) + (L234K + | |
| | | | | C243A + F310K + C321A + | |
| | | | | C356A) | |
| 4.3 | ∘ | NTD + CTD | BE4MAX | (P200A + N236A + P247K + | 12 |
| | | | | Q318K + Q322K) + (A3A loop3) + | |
| | | | | (L234K + C243A + F310K + | |
| | | | | C321A + C356A) | |
| 4.4 | ∘ | 198-384 (CTD) | BE4MAX | — | 13 |
| 4.5 | ∘ | 198-384 (CTD) | BE4MAX | D316R/D317R | 14 |
| 5.1 | ∘ | 198-384 (CTD) | BE4MAX | (P200A + N236A + P247K + | 15 |
| | | | | Q318K + Q322K) | |
| 5.2 | ∘ | 175-384 | BE4MAX | (P200A + N236A + P247K + | 16 |
| | | (alpha6 NTD + CTD) | | Q318K + Q322K) | |
| 5.3 | ∘ | 198-384 (CTD) | BE4MAX | (P200A + N236A + P247K + | 17 |
| | | | | Q318K + Q322K) + (A3A loop3)* | |
| 5.4 | ∘ | 198-384 (CTD) | BE4MAX | (P200A + N236A + P247K + | 18 |
| | | | | Q318K + Q322K) + (L234K + | |
| | | | | F310K + C243A + C321A + | |
| | | | | C356A) | |
| 5.5 | ∘ | 198-384 (CTD) | BE4MAX | (P200A + N236A + P247K + | 19 |
| | | | | Q318K + Q322K) + (A3A loop3) + | |
| | | | | (L234K + F310K + C243A + | |
| | | | | C321A + C356A) | |
| 5.6 | ∘ | 198-384 (CTD) | BE4MAX | (P200A + N236A + P247K + | 20 |
| | | | | Q318K + Q322K) + (A3A loop3) + | |
| | | | | Q322A | |
| 5.7 | ∘ | 198-384 (CTD) | BE4MAX | (P200A + N236A + P247K + | 21 |
| | | | | Q318K + Q322K) + (A3A loop3) + | |
| | | | | R320L | |
| 5.8 | ∘ | 198-384 (CTD) | BE4MAX | (P200A + N236A + P247K + | 22 |
| | | | | Q318K + Q322K) + (A3A loop3) + | |
| | | | | T311A | |
| 5.9 | ∘ | 198-384 (CTD) | BE4MAX | (P200A + N236A + P247K + | 23 |
| | | | | Q318K + Q322K) + (A3A loop3) + | |
| | | | | E217K | |
| 5.10 | ∘ | 198-384 (CTD) | BE4MAX | (P200A + N236A + P247K + | 24 |
| | | | | Q318K + Q322K) + (A3A loop3) + | |
| | | | | (T311A + R320L) | |
| 5.11 | ∘ | 198-384 (CTD) | BE4MAX | (P200A + N236A + P247K + | 25 |
| | | | | Q318K + Q322K) + (A3A loop3) + | |
| | | | | (T311A + R320L + E217K) | |
| 5.12 | ∘ | 198-384 (CTD) | BE4MAX | A3G 5.1 + Y315F | 26 |
| 5.13 | ∘ | 198-384 (CTD) | BE4MAX | A3G 5.3 + Y315F | 27 |
| 5.14 | ∘ | 198-384 (CTD) | BE4MAX | A3G 5.4 + Y315F | 28 |
| 5.20 | ∘ | 198-384 (CTD) | BE4MAX | A3G 5.13 with a PAP 3aa spacer | 49 |
| 5.21 | ∘ | 198-384 (CTD) | BE4MAX | A3G 5.20 + W285Y | 50 |
| 5.22 | ∘ | 198-384 (CTD) | BE4MAX | A3G 5.20 + W285F | 51 |
| 5.26 | ∘ | 198-384 (CTD) | BE4MAX | A3G 5.20 + R320A | 52 |
| 5.28 | ∘ | 198-384 (CTD) | BE4MAX | A3G 5.20 + R320E | 53 |
| 5.29 | ∘ | 198-384 (CTD) | BE4MAX | A3G 5.20 + R326E | 54 |
| 6.11 | ∘ | 198-384 (CTD) | BE4MAX | A3G 5.10 + Y315F | 29 |
| 6.12 | ∘ | 198-384 (CTD) | BE4MAX | A3G 5.10 + N244G | 30 |
| 6.13 | ∘ | 198-384 (CTD) | BE4MAX | A3G 5.10 + D316E | 31 |
| 6.14 | ∘ | 198-384 (CTD) | BE4MAX | A3G 5.10 + D316R + D317R | 32 |
| 6.15 | ∘ | 198-384 (CTD) | BE4MAX | A3G 5.10 + W285Y + R320E | 33 |
| 6.16 | ∘ | 198-384 (CTD) | BE4MAX | A3G 5.10 + Y315W | 34 |
| 6.17 | ∘ | 198-384 (CTD) | BE4MAX | A3G 5.10 + Y315L | 35 |
| 6.18 | ∘ | 198-384 (CTD) | BE4MAX | A3G 6.11 + N244Q | 36 |
| 6.19 | ∘ | 198-384 (CTD) | BE4MAX | A3G 6.11 + S286A | 37 |
| 6.20 | ∘ | 198-384 (CTD) | BE4MAX | A3G 6.11 + R313A | 38 |
| 6.21 | ∘ | 198-384 (CTD) | BE4MAX | A3G 6.11 + original A3G loop3 | 39 |
| 6.22 | ∘ | 198-384 (CTD) | BE4MAX | A3G 5.10 + R313A | 40 |
| 6.23 | ∘ | 198-384 (CTD) | BE4MAX | A3G 5.10 + N244Q | 41 |
| 6.24 | ∘ | 198-384 (CTD) | BE4MAX | A3G 5.10 + S286A | 42 |
| 7.1 | ∘ | 198-384 (CTD) | BE4MAX | A3G 5.13 + D316H | 43 |
| 7.5 | ∘ | 198-384 (CTD) | BE4MAX | A3G 5.13 + P247K-->P | 44 |
| 7.6 | ∘ | 198-384 (CTD) | BE4MAX | A3G 5.13 + Q318K-->Q | 45 |
| 8.1 | ∘ | 198-384 (CTD) | BE4MAX | A3G 5.13 + HypaCas9 | 46 |
| | | | | (Cas9: N692A + M694A + | |
| | | | | Q695A + H698A) | |

*A3A loop3 mutation includes P247K, H248N, K249L, H250L, G251C, F252G, L253F, E254Y. Note that P247K is already included in the first set of five mutations.
**Note that the positions of the amino acid substitutions are all relative to positions in SEQ ID NO: 48.
***For SEQ ID NO: 1, positions 2-197 represent the NTD of A3G, positions 198-400 represent the CTD of A3G, positions 401-1865 represent cas9 nickase, positions 1866-1771 represent a linker sequence, and positions 1772-1854 represent UGI; for each of SEQ ID NOs: 3-12, positions 2-19 represent one part of a bipartite nuclear localization sequence, positions 20-15 represent the NTD of A3G, positions 216-402 represent the CTD of A3G, positions 402-434 represent a linker sequence, positions 435-1801 represent cas9 nickase, positions 1802-1811 represent a linker sequence, positions 1812-1894 represent a first occurrence of UGI, positions 1895-1904 represent a linker sequence, 1905-1987 represent a second occurrence of UGI, positions 1988-1991 represent a linker sequence, and positions 1992-2008 represent the second part of a bipartite nuclear localization sequence; for each of SEQ ID NOs: 13-28, positions 2-19 represent one part of a bipartite nuclear localization sequence, positions 20-206 represent the CTD of A3G, positions 207-238 represent a linker sequence, positions 239-1605 represent cas9 nickase, positions 1606-1615 represent a linker sequence, positions 1616-1698 represent a first occurrence of UGI, positions 1699-1708 represent a linker sequence, 1709-1791 represent a second occurrence of UGI, positions 1792-1795 represent a linker sequence, and positions 1796-1812 represent the second part of a bipartite nuclear localization sequence; for SEQ ID NO: 16, positions 2-19 represent one part of a bipartite nuclear localization sequence, positions 20-229 represent the alpha6 NTD + CTD of A3G, positions 230-261 represent a linker sequence, positions 262-1628 represent cas9 nickase, positions 1629-1638 represent a linker sequence, positions 1639-1721 represent a first occurrence of UGI, positions 1722-1731 represent a linker sequence, 1732-1814 represent a second occurrence of UGI, positions 1815-1818 represent a linker sequence, and positions 1819-1835 represent the second part of a bipartite nuclear localization sequence; for SEQ ID NOs: 49-54, positions 2-19 represent one part of a bipartite nuclear localization sequence, positions 20-206 represent the CTD of A3G, positions 207-209 represent a linker sequence, positions 210-1576 represent cas9 nickase, positions 1577-1586 represent a linker sequence, positions 1587-1669 represent a first occurrence of UGI, positions 1670-1679 represent a linker sequence, 1680-1762 represent a second occurrence of UGI, positions 1763-1766 represent a linker sequence, and positions 1767-1783 represent the second part of a bipartite nuclear localization sequence.

### I. CERTAIN SELECTIVITY SPECIFICATIONS OF ENGINEERED A3G BASE EDITORS

[0050] The engineered base editors provided herein enable induction of clean C>T mutations in the context of two consecutive Cs (shown as ‘C₋₁C₀’) when the target C is C₀. This has been achieved by repurposing A3G as a base editor with a series of engineered mutations that enhance A3G enzymatic activity for C-to-T conversion while maintaining its ability to accurately discriminate between adjacent Cs. The largest distribution of genetic variants associated with pathogenic mutations are point mutations (Landrum et al., 2016; Rees et al., 2018). As such, the present engineered base editors can be advantageously used in clinical applications for disease mutation correction, as exemplified below with four cases of specific DNA sequence contexts that might greatly benefit from using the present engineered A3G base editors.

[0051] A. Correcting a Pathogenic T>C Point Mutation Lying in a Coding Strand ‘DCCD’ Sequence Motif (Case 1)

[0052] In one example, there may be a T>C point mutation in the second position of a codon in the coding strand as follows: (codon 1)NND-(codon 2)CYD-(codon 3)NNN, wherein Y denotes the T>C mutation site and D represents any nucleotide other than C (i.e., A, G, or T). As such, the pathogenic T>C point mutation lies in a ‘CC’ sequence motif, wherein the target C to be corrected is the C on the right. The two consecutive Cs are located in the first and the second positions of codon 2 on the coding strand. This pathogenic mutation causes codon 2 to encode only proline (Pro) (see Table 2). Using an engineered A3G base editor of the present disclosure, all correction outcomes converge toward leucine (Leu), while using different base editors lacking the ‘CC’ preferential motif may convert the C on the left and cause mutations of amino acids other than leucine to be possible outcomes as well (Table 2). Thus, in this example, the pathogenic T>C point mutation on the DNA coding strand, which causes a Leu>Pro amino acid mutation, can be cleanly and efficiently reverted back to Leu using an engineered A3G base editor of the present disclosure.

TABLE 2
Comparison of treatment outcomes for T > C disease mutations
using A3G-BE and rAPOBEC-BE3 in the context of consecutive
‘CC’ within a codon on the coding strand.

| Possible codon 2 | | | Higher chance of |
|---|---|---|---|
| disease variants | Treatment | Possible correction outcomes | clean correction |
| CCT (Pro) | A3G-BE | CTT (Leu) | Y |
| | Others | CTT (Leu), TTT (Phe), TCT (Ser) | |
| CCA (Pro) | A3G-BE | CTA (Leu) | Y |
| | Others | TTA (Leu), CTA (Leu), TCA (Ser) | |
| CCG (Pro) | A3G-BE | CTG (Leu) | Y |
| | Others | TTG (Leu), CTG (Leu), TCG (Ser) | |

[0053] B. Correcting a Pathogenic T>C Point Mutation Lying in a Coding Strand ‘DCCCD’ Sequence Motif (Case 2)

[0054] In one example, there may be a T>C point mutation in the first position of a codon in the coding strand as follows: (codon 1)DCC-(codon 2)YDN-(codon 3)NNN, wherein Y denotes the T>C mutation site and D represents any nucleotide other than C (i.e., A, G, or T). As such, the pathogenic T>C point mutation lies in a ‘CCC’ sequence motif spanning the second and the third positions of codon 1 and the first position of codon 2, wherein the pathogenic T>C mutation occurs on the first position of codon 2. Two assumption are made: (1) All three Cs lie within the activity window of the base editor in use, and (2) the first C (the second position of codon 1 will not be mutated to T when using the engineered A3G base editors provided herein, while other base editors lacking the ‘CC’ preferential motif will or can mutate the C to T. Here, codon 2 contains only one C that causes a pathogenic variant, meaning it is easy to correct the mutation back to its original T using any C-to-T base editors. However, the immediately preceding codon (codon 1) contains ‘CC’ dinucleotide sequence on the second and third positions, making a unique case of three consecutive Cs. In order to achieve clean disease correction, only codon 2 should be corrected, leaving codon 1 unaffected by potential C-to-T byproducts. To do so, the two Cs in codon 1 should not be mutated by base editors. Similar to the Case 1 analysis, Table 3 shows that using the present engineered A3G base editors can correct the disease mutation without affecting the preceding codon by higher chance, while other base editors lacking the ‘CC’ preferential motif may generate byproducts by converting codon 1 to other non-desired amino acid sequences.

TABLE 3
Comparison of treatment outcomes for T > C disease mutations
using A3G-BE and rAPOBEC-BE3 in the context of consecutive
‘CCC’ within two codons on the coding strand.

| Disease | | | | Higher |
|---|---|---|---|---|
| Mutation | | | | chance |
| (Codon | | Possible correction outcomes | | of clean |
| 1-Codon 2) | Treatment | First a.a. | Second a.a. | correction |
| TCC-CDN | A3G-BE | TCC (Ser), TCT (Ser) | TDN or | Y |
| (Ser)-(YDN | | | CDN | |
| a.a.) | Others | TCC (Ser), TCT (Ser), | TDN or | |
| | | TTC (Phe), TTT (Phe) | CDN | |
| CCC-CDN | A3G-BE | CCC (Pro), CCT (Pro), | TDN or | Y |
| (Pro)-YDN | | CTC (Leu), CTT (Leu) | CDN | |
| a.a.) | Others | CCC (Pro), CCT (Pro), | TDN or | |
| | | CTC (Leu), TCC (Ser), | CDN | |
| | | TCT (Ser), CTT (Leu), | | |
| | | TTC (Phe), TTT (Phe) | | |
| ACC-CDN | A3G-BE | ACC (Thr), ACT (Thr) | TDN or | Y |
| (Thr)-(YDN | | | CDN | |
| a.a.) | Others | ACC (Thr), ACT (Thr), | TDN or | |
| | | ATC (Ile), ATT (Ile) | CDN | |
| GCC-CDN | A3G-BE | GCC (Ala), GCT (Ala) | TDN or | Y |
| (Ala)-(YDN | | | CDN | |
| a.a.) | Others | GCC (Ala), GCT (Ala), | TDN or | |
| | | GTC (Val), GTT (Val) | CDN | |

[0055] C. Correcting a Pathogenic T>C Point Mutation Lying in a Non-Coding Strand ‘DCCD’ Sequence Motif (Case 3)

[0056] In one example, there may be a T>C point mutation in the third position of a codon in the non-coding strand as follows: (codon 3)NNN-(codon 2)DCY-(codon 1)DNN, wherein Y denotes the T>C mutation site and D represents any nucleotide other than C (i.e., A, G, or T). As such, the pathogenic T>C mutation occurs on the non-coding strand, thereby making a ‘CC’ motif on the first and second positions of codon 2 (note: the reading direction is opposite on the non-coding strand). The possible codon 2 DNA sequences are shown in the first column of Table 4, and the corresponding complementary 5′ to 3′ DNA sequences on the coding strand are shown in the second column with each of the corresponding amino acids written in parenthesis. From the above ‘CC’ dinucleotide sequence context on the non-coding strand, all possible amino acids are glycine (Gly). For the case in which the pathogenic T>C mutation generates a ‘GCC’ on the non-coding strand (or ‘GGC’ on the coding strand), an engineered A3G base editor can cleanly mutate it into serine (Ser). The same analysis was carried out for each mutation (Table 4). In sum, pathogenic T>C mutations on the non-coding strand involving arginine Arg>Gly and Ser>Gly can be cleanly corrected back to the original Arg or Ser amino acid using the present engineered A3G base editors.

TABLE 4
Comparison of treatment outcomes for T > C disease mutations
using A3G-BE and rAPOBEC-BE3 in the context of consecutive
‘CC’ within a codon on the coding strand.

| Disease | | | | Higher chance |
|---|---|---|---|---|
| mutation | Coding | | Possible correction | of clean |
| (non-coding) | strand | Treatment | outcomes | correction |
| GCC | GGC (Gly) | A3G-BE | GCT/AGC (Ser) | Y |
| | | Others | GCT/AGC (Ser), GTC/GAC | |
| | | | (Asp), GTT/AAC (Asn) | |
| ACC | GGT (Gly) | A3G-BE | ACT/AGT (Ser) | Y |
| | | Others | ACT/AGT (Ser), ATC/GAT | |
| | | | (Asp), ATT/AAT (Asn) | |
| TCC | GGA (Gly) | A3G-BE | TCT/AGA (Arg) | Y |
| | | Others | TCT/AGA (Arg), TTC/GAA | |
| | | | (Glu), TTT/AAA (Lys) | |

[0057] D. Correcting a Pathogenic T>C Point Mutation Lying in a Non-Coding Strand ‘DCCD’ Sequence Motif (Case 4)

[0058] In one example, there may be a T>C point mutation in the second position of a codon in the non-coding strand as follows: (codon 3)NND-(codon 2)CYD-(codon 1)NNN, wherein Y denotes the T>C mutation site and D represents any nucleotide other than C (i.e., A, G, or T). As such, the ‘CC’ motif takes place on the second and third positions of codon 2 on the non-coding strand due to a pathogenic T>C mutation. The same analysis holds as Case 3. In sum, T>C disease mutations on the non-coding strand involving glutamine (Gln)>Arg and lysine (Lys)>Arg can be cleanly corrected back to the original Gln or Lys using the present engineered A3G base editors (Table 5).

TABLE 5
Comparison of treatment outcomes for T > C disease mutations using
A3G-BE and rAPOBEC-BE3 in the context of consecutive ‘CC’ within
the second and third positions of a codon on the non-coding strand.

| Disease | | | | Higher chance |
|---|---|---|---|---|
| mutation | Coding | | | of clean |
| (non-coding) | strand | Treatment | Possible correction outcomes | correction |
| CCG | CGG | A3G-BE | CTG/CAG (Gln) | Y |
| | (Arg) | Others | CTG/CAG (Gln), TCG/CGA | |
| | | | (Arg), TTG/CAA (Gln) | |
| CCA | TGG | A3G-BE | CTA/TAG (stop) | Same |
| | (Trp) | Others | CTA/TAG (stop), TCA/TGA | Same |
| | | | (stop), TTA/TAA (stop) | |
| CCT | AGG | A3G-BE | CTT/AAG (Lys) | Y |
| | (Arg) | Others | CTT/AAG (Lys), TCT/AGA | |
| | | | (Arg), TTT/AAA (Lys) | |

### II. DNA-TARGETING PROTEINS

[0059] The DNA targeting protein fused to the engineered APOBEC3G may be Streptococcus pyogenes Cas9 (SpCas9), which recognizes the NGG PAM. Alternatively the DNA targeting protein may use SunTag-mediated recruitment (Jiang et al., 2018; Tanenbaum et al., 2014). Other Cas9 variants may recognize different PAM sequence, for example Staphylococcus aureus Cas9 (SaCas9) natively recognizes the NNGRRT PAM. The DNA-targeting Cas9 protein can be replaced by other orthologs to recognize different PAM sequences to expand the targeting scope for ‘CC’ dinucleotide motif in the whole genome. These Cas9 variants include, but are not limited to, Cas9-VQR, Cas9-VRER, SaCas9, StCas9, NmCas9, CjCas9, and so on. Moreover, other native or engineered CRISPR-based DNA targeting proteins, including, but not limited to, CasX, CasY, Cpf1, C2c1, C2c2, C2c3, and others can all be fused to the engineered APOBEC3G to obtain single C-to-T conversion in the context of consecutive Cs on DNA.

[0060] Base editor variants may have expanded window sizes than the 5nt canonical window, such as by fusing a different Cas9 variant (Kim et al., 2017; Huang et al., 2019), using different recruiting systems of cytosine deaminase to the DNA target (Jiang et al., 2018), or changing lengths of guide RNAs (Ryu et al., 2018). The expanded window size in most cases increases the chance to generate non-target C-to-T byproducts when multiple Cs are present in the broadened window. In the case of an engineered variant that recognizes the ‘CC’ preferential motif, the broadened window size can increase the targeting scope for cases in which the target C within the context of consecutive ‘CC’ is positioned outside the canonical 5nt window. Conventional base editors may convert one or more of any Cs present within the broadened window while our variant in principle enables converting the single C that is within the context of ‘CC.’ However, when more than one ‘CC’ motifs are present within the broadened window, multiple Cs can still be converted and generate unwanted byproducts but less in amount than other base editors lacking the preferential motif.

[0061] In general, “CRISPR system” refers collectively to transcripts and other elements involved in the expression of or directing the activity of CRISPR-associated (“Cas”) genes, including sequences encoding a Cas gene, a tracr (trans-activating CRISPR) sequence (e.g. tracrRNA or an active partial tracrRNA), a tracr-mate sequence (encompassing a “direct repeat” and a tracrRNA-processed partial direct repeat in the context of an endogenous CRISPR system), a guide sequence (also referred to as a “spacer” in the context of an endogenous CRISPR system), and/or other sequences and transcripts from a CRISPR locus.

[0062] The CRISPR/Cas nuclease or CRISPR/Cas nuclease system can include a non-coding RNA molecule (guide) RNA, which sequence-specifically binds to DNA, and a Cas protein (e.g., Cas9), with nuclease functionality (e.g., two nuclease domains). One or more elements of a CRISPR system can derive from a type I, type II, or type III CRISPR system, e.g., derived from a particular organism comprising an endogenous CRISPR system, such as Streptococcus pyogenes.

[0063] The CRISPR system can induce double stranded breaks (DSBs) at the target site, followed by disruptions as discussed herein. In other embodiments, Cas9 variants, deemed “nickases,” are used to nick a single strand at the target site. Paired nickases can be used, e.g., to improve specificity, each directed by a pair of different gRNAs targeting sequences such that upon introduction of the nicks simultaneously, a 5′ overhang is introduced. In other embodiments, catalytically inactive Cas9 is fused to a heterologous effector domain such as a cytosine deaminase domain.

[0064] In some aspects, a Cas nuclease and gRNA (including a fusion of crRNA specific for the target sequence and fixed tracrRNA) are introduced into the cell. In general, target sites at the 5′ end of the gRNA target the Cas nuclease to the target site, e.g., the gene, using complementary base pairing. The target site may be selected based on its location immediately 5′ of a protospacer adjacent motif (PAM) sequence, such as typically NGG, or NAG. In this respect, the gRNA is targeted to the desired sequence by modifying the first 20, 19, 18, 17, 16, 15, 14, 14, 12, 11, or 10 nucleotides of the guide RNA to correspond to the target DNA sequence. In general, a CRISPR system is characterized by elements that promote the formation of a CRISPR complex at the site of a target sequence. Typically, “target sequence” generally refers to a sequence to which a guide sequence is designed to have complementarity, where hybridization between the target sequence and a guide sequence promotes the formation of a CRISPR complex. Full complementarity is not necessarily required, provided there is sufficient complementarity to cause hybridization and promote formation of a CRISPR complex.

[0065] The target sequence may comprise any polynucleotide, such as DNA or RNA polynucleotides. The target sequence may be located in the nucleus or cytoplasm of the cell, such as within an organelle of the cell.

[0066] Typically, in the context of an endogenous CRISPR system, formation of the CRISPR complex (comprising the guide sequence hybridized to the target sequence and complexed with one or more Cas proteins) results in cleavage of one or both strands in or near (e.g. within 1, 2, 3, 4, 5, 6, 7, 8, 9, 10, 20, 50, or more base pairs from) the target sequence. The tracr sequence, which may comprise or consist of all or a portion of a wild-type tracr sequence (e.g. about or more than about 20, 26, 32, 45, 48, 54, 63, 67, 85, or more nucleotides of a wild-type tracr sequence), may also form part of the CRISPR complex, such as by hybridization along at least a portion of the tracr sequence to all or a portion of a tracr mate sequence that is operably linked to the guide sequence. The tracr sequence has sufficient complementarity to a tracr mate sequence to hybridize and participate in formation of the CRISPR complex, such as at least 50%, 60%, 70%, 80%, 90%, 95% or 99% of sequence complementarity along the length of the tracr mate sequence when optimally aligned.

[0067] One or more vectors driving expression of one or more elements of the CRISPR system can be introduced into the cell such that expression of the elements of the CRISPR system direct formation of the CRISPR complex at one or more target sites. Components can also be delivered to cells as proteins and/or RNA. For example, a Cas enzyme, a guide sequence linked to a tracr-mate sequence, and a tracr sequence could each be operably linked to separate regulatory elements on separate vectors.

[0068] Alternatively, two or more of the elements expressed from the same or different regulatory elements, may be combined in a single vector, with one or more additional vectors providing any components of the CRISPR system not included in the first vector. The vector may comprise one or more insertion sites, such as a restriction endonuclease recognition sequence (also referred to as a “cloning site”). In some embodiments, one or more insertion sites are located upstream and/or downstream of one or more sequence elements of one or more vectors. When multiple different guide sequences are used, a single expression construct may be used to target CRISPR activity to multiple different, corresponding target sequences within a cell.

[0069] A vector may comprise a regulatory element operably linked to an enzyme-coding sequence encoding the CRISPR enzyme, such as a Cas protein. Non-limiting examples of Cas proteins include Cas1, Cas1B, Cas2, Cas3, Cas4, Cas5, Cas6, Cas7, Cas8, Cas9 (also known as Csn1 and Csx12), Cas10, Csy1, Csy2, Csy3, Cse1, Cse2, Csc1, Csc2, Csa5, Csn2, Csm2, Csm3, Csm4, Csm5, Csm6, Cmr1, Cmr3, Cmr4, Cmr5, Cmr6, Csb1, Csb2, Csb3, Csx17, Csx14, Csx10, Csx16, CsaX, Csx3, Csx1, Csx15, Csf1, Csf2, Csf3, Csf4, homologs thereof, or modified versions thereof. These enzymes are known; for example, the amino acid sequence of S. pyogenes Cas9 protein may be found in the SwissProt database under accession number Q99ZW2.

[0070] The CRISPR enzyme can be Cas9 (e.g., from S. pyogenes or S. pneumonia). The CRISPR enzyme can direct cleavage of one or both strands at the location of a target sequence, such as within the target sequence and/or within the complement of the target sequence. The vector can encode a CRISPR enzyme that is mutated with respect to a corresponding wild-type enzyme such that the mutated CRISPR enzyme lacks the ability to cleave one or both strands of a target polynucleotide containing a target sequence. For example, an aspartate-to-alanine substitution (D10A) in the RuvC I catalytic domain of Cas9 from S. pyogenes converts Cas9 from a nuclease that cleaves both strands to a nickase (cleaves a single strand).

[0071] In some embodiments, an enzyme coding sequence encoding the CRISPR enzyme is codon optimized for expression in particular cells, such as eukaryotic cells. The eukaryotic cells may be those of or derived from a particular organism, such as a mammal, including but not limited to human, mouse, rat, rabbit, dog, or non-human primate. In general, codon optimization refers to a process of modifying a nucleic acid sequence for enhanced expression in the host cells of interest by replacing at least one codon of the native sequence with codons that are more frequently or most frequently used in the genes of that host cell while maintaining the native amino acid sequence. Various species exhibit particular bias for certain codons of a particular amino acid. Codon bias (differences in codon usage between organisms) often correlates with the efficiency of translation of messenger RNA (mRNA), which is in turn believed to be dependent on, among other things, the properties of the codons being translated and the availability of particular transfer RNA (tRNA) molecules. The predominance of selected tRNAs in a cell is generally a reflection of the codons used most frequently in peptide synthesis. Accordingly, genes can be tailored for optimal gene expression in a given organism based on codon optimization.

[0072] In general, a guide sequence is any polynucleotide sequence having sufficient complementarity with a target polynucleotide sequence to hybridize with the target sequence and direct sequence-specific binding of the CRISPR complex to the target sequence. In some embodiments, the degree of complementarity between a guide sequence and its corresponding target sequence, when optimally aligned using a suitable alignment algorithm, is about or more than about 50%, 60%, 75%, 80%, 85%, 90%, 95%, 97.5%, 99%, or more.

[0073] Optimal alignment may be determined with the use of any suitable algorithm for aligning sequences, non-limiting example of which include the Smith-Waterman algorithm, the Needleman-Wunsch algorithm, algorithms based on the Burrows-Wheeler Transform (e.g. the Burrows Wheeler Aligner), Clustal W, Clustal X, BLAT, Novoalign (Novocraft Technologies, ELAND (Illumina, San Diego, Calif.), SOAP (available at soap.genomics.org.cn), and Maq (available at maq.sourceforge.net).

[0074] The CRISPR enzyme may be part of a fusion protein comprising one or more heterologous protein domains. A CRISPR enzyme fusion protein may comprise any additional protein sequence, and optionally a linker sequence between any two domains. Examples of protein domains that may be fused to a CRISPR enzyme include, without limitation, epitope tags, reporter gene sequences, and protein domains having one or more of the following activities: deaminase activity. Non-limiting examples of epitope tags include histidine (His) tags, V5 tags, FLAG tags, influenza hemagglutinin (HA) tags, Myc tags, VSV-G tags, and thioredoxin (Trx) tags. Examples of reporter genes include, but are not limited to, glutathione-5-transferase (GST), horseradish peroxidase (HRP), chloramphenicol acetyltransferase (CAT) beta galactosidase, beta-glucuronidase, luciferase, green fluorescent protein (GFP), HcRed, DsRed, cyan fluorescent protein (CFP), yellow fluorescent protein (YFP), and autofluorescent proteins including blue fluorescent protein (BFP). A CRISPR enzyme may be fused to a gene sequence encoding a protein or a fragment of a protein that bind DNA molecules or bind other cellular molecules, including but not limited to maltose binding protein (MBP), S-tag, Lex A DNA binding domain (DBD) fusions, GAL4A DNA binding domain fusions, and herpes simplex virus (HSV) BP16 protein fusions. Additional domains that may form part of a fusion protein comprising a CRISPR enzyme are described in US 20110059502, incorporated herein by reference.

### III. BASED-EDITABLE DISEASE VARIANTS

[0075] Among the total of 1515 pathogenic SNPs identified within the BEable-GPS entries (Wang et al., 2019), 61% (929/1515) were found to lie within the CC or CNC sequence context preferred by A3G-Bes (Gehrke et al., 2018). By way of example, 540 human pathogenic SNPs were identified that could be precisely correctable by the present A3G-Bes: Familial cancer of breast, Breast-ovarian cancer, familial 1, Hereditary cancer predisposing syndrome (NM 007294.3(BRCA1):c.65T>C(p.Leu22Ser)); Cleft palate, psychomotor retardation, and distinctive facial features (NM_001009999.2(KDM1A):c.2353T>C(p.Tyr785His)); Mild non-PKU hyperphenylalaninemia (NM_000277.1(PAH):c.293T>C(p.Leu98Ser)); Amyotrophic lateral sclerosis type 1 (NM_000454.4(SOD1):c.302A>G(p.Glu101Gly)); Hemolytic anemia due to hexokinase deficiency (NM_033500.2(HK1):c.1550T>C(p.Leu517Ser)); Early infantile epileptic encephalopathy 16 (NM_001199107.1(TBC1D24):c.686T>C(p.Phe229Ser)); Hereditary diffuse leukoencephalopathy with spheroids (NM_005211.3(CSF1R):c.2483T>C(p.Phe828Ser)); TNF receptor syndrome (TRAPS)-associated periodic fever (NM_001065.3 (TNFRSF1A):c.349T>C(p.Cys117Arg)); Limb dystroglycanopathy, type C4-girdle muscular dystrophy (NM_001079802.1(FKTN):c.527T>C(p.Phe176Ser)); Alexander disease (NM_002055.4(GFAP):c.1055T>C(p.Leu352Pro)); Loeys-Dietz syndrome 2 (NM_003242.5(TGFBR2):c.923T>C(p.Leu308Pro)); Leukoencephalopathy with vanishing white matter (NM_003907.2(EIF2B5):c.1882T>C(p.Trp628Arg)); Deficiency of UDPglucose-hexo se-1-phosphateuridylyltransferase (NM_000155.3 (GALT):c.563A>G(p.Gln188Arg)); Spherocytosis, type 1, autosomal recessive (NM_000037.3(ANK1):c.-108T>C); Deafness, autosomal recessive 9 (NM_194248.2(OTOF):c.766-2A>G); Alport syndrome, X-linked recessive (NM_000495.4(COL4A5):c.1340-2A>G); WFS1-Related Disorders (NM_006005.3 (WFS1):c.2486T>C(p.Leu829Pro)); Papillon-Lefvre syndrome, Haim-Munk syndrome (NM_001814.4(CTSC):c.857A>G(p.Gln286Arg)); Congenital disorder of glycosylation type 1F (NM_004870.3(MPDU1):c.356T>C(p.Leu119Pro)); Deficiency of UDPglucose-hexose-1-phosphateuridylyltransferase (NM_000155.3(GALT):c.1138T>C(p.Ter380Arg)); Central core disease (NM_000540.2(RYR1):c.10817T>C(p.Leu3606Pro)); Schnyder crystalline corneal dystrophy (NM_013319.2(UBIAD1):c.355A>G(p.Arg119Gly)); Metachromatic leukodystrophy, adult type (NM_000487.5(ARSA):c.410T>C(p.Leu137Pro)); Osteopetrosis autosomal recessive 4 (NM_001287.5(CLCN7):c.2297T>C(p.Leu766Pro)); Zellweger syndrome (NM_000466.2(PEX1):c.1991T>C(p.Leu664Pro)); Congenital disorder of glycosylation type 1G (NM_024105.3 (ALG12):c.473T>C (p.Leu158Pro)); Acroerythrokeratoderma (NM_020427.2(SLURP1):c.43T>C (p.Trp15Arg)); Anemia, sideroblastic, pyridoxine autosomal recessive-refractory, (NM_016417.2(GLRX5):c.294A>G(p.Gln98=)); Familial hypokalemia-hypomagnesemia (NM_000339.2(SLC12A3):c.1868T>C(p.Leu623Pro)); Epidermolysis bullosa dystrophica inversa, autosomal recessive (NM_000094.3(COL7A1):c.425A>G(p.Lys142Arg)); Leprechaunism syndrome (NM_000208.2(INSR):c.779T>C(p.Leu260Pro)); Macular corneal dystrophy Type I (NM_021615.4(CHST6):c.827T>C(p.Leu276Pro)); Tyrosinemia type I (NM_000137.2(FAH):c.1141A>G(p.Arg381Gly)); X-linked agammaglobulinemia with growth hormone deficiency (NM_000061.2(BTK):c.1625T>C(p.Leu542Pro); (NM_000044.3(AR):c.2033T>C(p.Leu678Pro)); Noonan syndrome, Noonan syndrome 4, Rasopathy (NM_005633.3 (SOS1):c.1654A>G(p.Arg552Gly)); Bietti crystalline corneoretinal dystrophy (NM_207352.3(CYP4V2):c.1393A>G(p.Arg465Gly)); Pontocerebellar hypoplasia type 6 (NM_020320.3(RARS2):c.35A>G(p.Gln12Arg)); Ullrich congenital muscular dystrophy (NM_001849.3(COL6A2):c.2329T>C(p.Cys777Arg)); Deafness, autosomal recessive 7 (NM_138691.2(TMC1):c.1763+3A>G); Distal arthrogryposis type 1B (NM_002465.3(MYBPC1):c.2566T>C(p.Tyr856His)); Mitochondrial complex I deficiency (NM_016013.3 (NDUFAF1):c.758A>G(p.Lys253 Arg)); Cataract, autosomal recessive congenital 2 (NM_024513.3 (FYCO1):c.4127T>C(p.Leu1376Pro)); Distal hereditary motor neuronopathy type 5B (NM_022912.2(REEP1):c.304-2A>G); Polymicrogyria, asymmetric (NM_178012.4(TUBB2B):c.350T>C(p.Leu117Pro)); Congenital disorder of glycosylation type 1J (NM_001382.3(DPAGT1):c.503T>C(p.Leu168Pro)); Usher syndrome, type 1 (NM_000260.3(MYO7A):c.6439-2A>G); Fabry disease (NM_000169.2(GLA):c.548-2A>G); Tatton-Brown-rahman syndrome (NM_022552.4(DNMT3A):c.1943T>C(p.Leu648Pro)); Retinitis pigmentosa 51 (NM_144596.3(TTC8):c.115-2A>G); Hereditary cancer-predisposing syndrome (NM_000535.5(PMS2):c.904-2A>G); Congenital muscular hypertrophy-cerebralsyndrome (NM_006306.3 (SMC1A):c.616-2A>G); Hereditary diffuse leukoencephalopathy withspheroids (NM_005211.3 (CSF1R):c.1957T>C(p.Cys653Arg)); Hereditary diffuse leukoencephalopathy with spheroids (NM_005211.3(CSF1R):c.1745T>C(p.Leu582Pro)); Emery-Dreifuss muscular dystrophy 1, X-linked (NM_000117.2(EMD):c.266-2A>G); Niemann-Pick disease, type A, Niemann-Pickdisease, type B (NM_000543.4(SMPD1):c.475T>C(p.Cys159Arg)); not provided (NM_000169.2(GLA):c.370-2A>G); Familial hypertrophic cardiomyopathy 4, Cardiomyopathy (NM_000256.3(MYBPC3):c.1227-2A>G); Hereditary cancer-predisposing syndrome (NM_000051.3(ATM):c.3154-2A>G); Hereditary cancer-predisposing syndrome (NM_000455.4(STK11):c.545T>C(p.Leu182Pro)); Homocysteinemia due to MTHFR deficiency (NM_005957.4(MTHFR):c.388T>C(p.Cys130Arg)); Cardiac arrhythmia (NM_000238.3(KCNH2):c.1129-2A>G); Cardiac arrhythmia (NM_000238.3(KCNH2):c.2396T>C(p.Leu799Pro)); Cardiac arrhythmia (NM_000218.2(KCNQ1):c.1515-2A>G); not provided (NM_198056.2(SCN5A):c.2788-2A>G); Primary hyperoxaluria, type I (NM_000030.2(AGXT):c.777-2A>G); Primary hyperoxaluria, type III (NM_138413.3 (HOGA1):c.533T>C(p.Leu178Pro)); Epidermolysis bullosa herpetiformis, Dowling Meara (NM_000424.3 (KRT5):c.541T>C (p.Ser181Pro)); Primary hyperoxaluria, type I (NM_000030.2(AGXT):c.302T>C(p.Leu101Pro)); Citrullinemia type I (NM_000050.4(ASS1):c.421-2A>G); Ataxia-telangiectasia syndrome (NM_000051.3(ATM):c.1236-2A>G); Hereditary hemorrhagic telangiectasia type 1 (NM_000118.3(ENG):c.662T>C(p.Leu221Pro)); Hereditary factor VIII deficiency disease (NM_000132.3(F8):c.2029T>C(p.Phe677Leu)); Glycogen storage disease, type II (NM_000152.4(GAA):c.1064T>C(p.Leu355Pro)); Glycogen storage disease, type II (NM_000152.4(GAA):c.896T>C(p.Leu299Pro)); Maturity-onset diabetes of the young, type 2 (NM_000162.3(GCK):c.941T>C(p.Leu314Pro)); not provided (NM_000162.4(GCK):c.46-2A>G); Fabry disease (NM_000169.2(GLA):c.424T>C(p.Cys142Arg)); Long-chain 3-hydroxyacyl-CoA dehydrogenase deficiency (NM_000182.4(HADHA):c.1690-2A>G); not provided (NM_000199.3(SGSH):c.356-2A>G); Hereditary cancer-predisposing syndrome; Lynch syndrome (NM_000249.3(MLH1):c.883A>G(p.Ser295Gly)); Usher syndrome, type 1 (NM_000260.3(MYO7A):c.1952T>C(p.Leu651Pro)); not provided (NM_000296.3(PKD1):c.11710-2A>G); Hereditary cancer-predisposing syndrome (NM_000321.2(RB1):c.1128-2A>G); Familial hypokalemia-hypomagnesemia (NM_000339.2(SLC12A3):c.2576T>C(p.Leu859Pro)); 3-Oxo-5 alpha-steroid delta 4-dehydrogenase deficiency (NM_000348.3(SRD5A2):c.282-2A>G); Stargardt disease 1 (NM_000350.2(ABCA4):c.4462T>C(p.Cys1488Arg)); Non-immune hydrops fetalis; Sialidosis, type II (NM_000434.3(NEU1):c.353-2A>G); Familial hypercholesterolemia (NM_000527.4(LDLR):c.478T>C(p.Cys160Arg)); Li-Fraumeni syndrome (NM_000546.5(TP53):c.673-2A>G); not provided (NM_000548.4(TSC2):c.2640-2A>G); Von Hippel-Lindau syndrome (NM_000551.3(VHL):c.341-2A>G); Niemann-Pick disease, type A (NM_001007593.2(SMPD1):c.1670T>C(p.Leu557Pro)); Spastic paraplegia 74, autosomal recessive (NM_001010867.3(IBA57):c.678A>G(p.Gln226=)); Periventricular nodular heterotopia 1 (NM_001110556.1(FLNA):c.2405-2A>G); not provided (NM_001170629.1(CHD8):c.2487-2A>G); primary pulmonary hypertension (NM_001204.6(BMPR2):c.1019T>C(p.Leu340Pro)); Hereditary myopathy with early respiratory failure (NM_001267550.2(TTN):c.95185T>C(p.Trp31729Arg)); not provided (NM_001456.3(FLNA):c.2566-2A>G); Alexander's disease; not provided (NM_002055.4(GFAP):c.1096T>C(p.Tyr366His)); Alexander's disease; not provided (NM_002055.4(GFAP):c.269T>C(p.Leu90Pro)); Pulmonary fibrosis and/or bone marrow failure, telomere-related, 4 (NM_002582.3(PARN):c.246-2A>G); Cataract 30 (NM_003380.3(VIM):c.623A>G(p.Gln208Arg)); Myopia 25, autosomal dominant (NM_004199.2(P4HA2):c.419A>G(p.Gln140Arg)); Hereditary diffuse gastric cancer (NM_004360.4(CDH1):c.49-2A>G); Robinow syndrome; Robinow syndrome, autosomal dominant 3 (NM_004423.3(DVL3):c.1715-2A>G); Cystinosis (NM_004937.2(CTNS):c.853-2A>G); Methylmalonate semialdehyde dehydrogenase deficiency (NM_005589.3(ALDH6A1):c.514T>C(p.Tyr172His)); Leukodystrophy, hypomyelinating, 6 (NM_006087.3 (TUBB4A):c.1099T>C(p.Phe367Leu)); Schizophrenia (NM_014712.2(SETD1A):c.518-2A>G); Deafness, autosomal recessive 3 (NM_016239.3(MYO15A):c.6178-2A>G); Kindler's syndrome (NM_017671.4(FERMT1):c.889A>G(p.Arg297Gly)); Mucolipidosis type IV (NM_020533.2(MCOLN1):c.317T>C(p.Leu106Pro)); Familial medullary thyroid carcinoma; MEN2A and FMTC (NM_020630.4(RET):c.1825T>C(p.Cys609Arg)); Neurodevelopmental disorder with microcephaly, hypotonia, and variable brain anomalies (NM_021222.2(PRUNE1):c.521-2A>G); Joubert syndrome (NM_030578.3(B9D2):c.107T>C(p.Leu36Pro)); 3-methylglutaconic aciduria with cataracts, neurologic involvement, and neutropenia (NM_030813.5(CLPB):c.1222A>G(p.Arg408Gly)); Cone-rod dystrophy and hearing loss (NM_032171.2(CEP78):c.1629-2A>G); Bardet-Biedl syndrome 4 (NM_033028.4(BBS4):c.406-2A>G); Leigh syndrome due to mitochondrial complex I deficiency (NM_152416.3(NDUFAF6):c.820A>G(p.Arg274Gly)); not provided (NM_173483.3(CYP4F22):c.1007-2A>G); DICER1-related pleuropulmonary blastoma cancer predisposition syndrome (NM_177438.2(DICER1):c.2236A>G(p.Arg746Gly)); Deafness, autosomal recessive 9 (NM_194248.2(OTOF):c.5992T>C(p.Ter1998Arg)); Epileptic encephalopathy, early infantile, 53 (NM_203446.2(SYNJ1):c.3365-2A>G); Congenital long QT syndrome (NM_000335.4(SCN5A):c.3971A>G(p.Asn1324Ser)); Epidermolysis bullosa herpetiformis, Dowling Meara (NM_000526.4(KRT14):c.368A>G(p.Asn123Ser)); Pachyonychia congenita type 1, Palmoplantar keratoderma, nonepidermolytic, focal (NM_005557.3(KRT16):c.374A>G(p.Asn125Ser)); Hyperkalemic Periodic Paralysis Type 1, Paramyotonia congenita of von Eulenburg (NM_000334.4(SCN4A):c.2078T>C(p.Ile693Thr)); Hyperkalemic Periodic Paralysis Type 1 (NM_000334.4(SCN4A):c.4078A>G(p.Met1360Val)); Hyperkalemic Periodic Paralysis Type 1 (NM_000334.4(SCN4A):c.4108A>G(p.Met1370Val)); Familial hyperkalemic periodic paralysis e 1 (NM_000334.4(SCN4A):c.4774A>G(p.Met1592Val)); Primary erythromelalgia (NM_002977.3(SCN9A):c.2543T>C(p.Ile848Thr)); Immunodeficiency 17 (NM_000073.2(CD3G):c.1A>G(p.Met1Val)); Papillon Periodontitis, aggressive, Papillon-Lefvre syndrome (NM_001814.4(CTSC):c.1040A>G(p.Tyr347Cys)); Islet cell hyperplasia (NM_000525.3(KCNJ11):c.776A>G(p.His259Arg)); Deficiency of UDPglucose-hexose-1-phosphateuridylyltransferase (NM_000155.3 (GALT):c.386T>C (p.Met129Thr)); Pontocerebellar hypoplasia type 2B (NM_025265.3(TSEN2):c.926A>G(p.Tyr309Cys)); Malignant hyperthermia susceptibility type 1, Central core disease (NM_000540.2(RYR1):c.14693T>C(p.Ile4898Thr)); Lethal arthrogryposis with anterior horn cell disease (NM_001003722.1(GLE1):c.2051T>C(p.Ile684Thr)); Spastic paraplegia 10 (NM_004984.2(KIF5A):c.827A>G(p.Tyr276Cys) (m.4269A>G)); Skeletal defects, genital hypoplasia, and mentalretardation (NM_006006.4(ZBTB16):c.1849A>G(p.Met617Val)); Eichsfeld type congenital muscular dystrophy (NM_020451.2(SEPN1):c.1A>G(p.Met1Val)); Ehlers-Danlos syndrome, musculocontractural type (NM_130468.3(CHST14):c.878A>G(p.Tyr293Cys)); Amyotrophic lateral sclerosis type 1 (NM_000454.4(SOD1):c.341T>C(p.Ile114Thr)); Fibrosis of extraocular muscles, congenital, 1 (NM_001173464.1(KIF21A):c.2839A>G(p.Met947Val)); Factor xiii, a subunit, deficiency of (NM_000129.3(F13A1):c.851A>G(p.Tyr284Cys)); Thyroid hormone resistance, generalized, autosomal dominant (NM_001128177.1(THRB):c.1324A>G(p.Met442Val)); Hereditary factor IX deficiency disease (NM_000133.3(F9):c.917A>G(p.Asn306Ser)); Hereditary factor VIII deficiency disease (NM_000132.3(F8):c.398A>G(p.Tyr133Cys)); Distal hereditary motor neuronopathy type 5, Silver spastic paraplegia syndrome, CharcotMarie-Tooth disease, type 2 (NM_032667.6(BSCL2):c.263A>G(p.Asn88Ser)); Incontinentia pigmenti syndrome (NM_003639.4(IKBKG):c.1219A>G(p.Met407Val)); Marfan syndrome (NM_000138.4(FBN1):c.4987T>C(p.Cys1663Arg)); Emery-Dreifuss muscular dystrophy, X-linked (NM_000117.2(EMD):c.1A>G(p.Met1Val)); Dursun syndrome (NM_138387.3(G6PC3):c.346A>G(p.Met116Val)); Hereditary Nonpolyposis Colorectal Neoplasms (NM_000249.3(MLH1):c.884+4A>G); Parkinson disease 8, autosomal dominant (NM_198578.3(LRRK2):c.5605A>G(p.Met1869Val)); not provided (NM_002693.2(POLG):c.1808T>C(p.Met603Thr)); not provided (NM_174917.4(ACSF3):c.1A>G(p.Met1Val)); Polyarteritis nodosa (NM_001282227.1(CECR1):c.1232A>G(p.Tyr411Cys)); Hereditary factor IX deficiency disease (NM_000133.3(F9):c.1031T>C(p.Ile344Thr)); Severe congenital neutropenia X-linked (NM_000377.2(WAS):c.881T>C(p.Ile294Thr)); Osteopetrosis autosomal dominant type 2, Osteopetrosis autosomal recessive 4 (NM_001287.5(CLCN7):c.296A>G(p.Tyr99Cys)); Cystic fibrosis (NM_000492.3(CFTR):c.1A>G(p.Met1Val)); Biotinidase deficiency (NM_000060.3(BTD):c.278A>G(p.Tyr93Cys)); Biotinidase deficiency (NM_000060.3(BTD):c.1313A>G(p.Tyr438Cys)); Early infantile epileptic encephalopathy 7 (NM_172107.2(KCNQ2):c.1636A>G(p.Met546Val)); Congenital contractural arachnodactyly (NM_001999.3(FBN2):c.3725-15A>G); Atrial fibrillation, familial, 16 (NM_018400.3 (SCN3B):c.482T>C(p.Met161Thr)); Myopia 24, autosomal dominant (NM_173596.2(SLC39A5):c.911T>C(p.Met304Thr)); X-linked hereditary motor and sensory neuropathy (NM_000166.5(GJB1):c.580A>G(p.Met194Val)); Charcot-Marie-Tooth disease, X-linked recessive, type 5, Deafness, high-frequency sensorineural, X-linked (NM_002764.3(PRPS1):c.343A>G(p.Met115Val)); Episodic pain syndrome, familial, 3 (NM_001287223.1(SCN11A):c.1142T>C(p.Ile381Thr)); Cardiomyopathy (NM_000257.3(MYH7):c.1615A>G(p.Met539Val)); Spondyloepimetaphyseal dysplasia with joint laxity (NM_080605.3(B3GALT6):c.1A>G(p.Met1Val)); Thoracic aortic aneurysms and aortic dissections (NM_000138.4(FBN1):c.7916A>G(p.Tyr2639Cys)); not provided (NM_000255.3(MUT):c.329A>G(p.Tyr110Cys)); Transposition of great arteries (NM_015335.4(MED13L):c.6068A>G(p.Asp2023Gly)); not provided (NM_000083.2(CLCN1):c.1453A>G(p.Met485Val)); not provided (NM_000137.2(FAH):c.1A>G(p.Met1Val)); Deficiency of UDPglucose-hexose-1-phosphate uridylyltransferase (NM_000155.3 (GALT):c.425T>C(p.Met142Thr)); Epidermolytic palmoplantar keratoderma (NM_000226.3(KRT9):c.470T>C(p.Met157Thr)); not provided (NM_000238.3(KCNH2):c.125T>C(p.Ile42Thr)); Familial hypertrophic cardiomyopathy 1; Hypertrophic cardiomyopathy; Primary familial hypertrophic cardiomyopathy (NM_000257.3(MYH7):c.2207T>C(p.Ile736Thr)); Deafness, autosomal recessive 2 (NM_000260.3(MYO7A):c.620A>G(p.Asn207Ser)); not provided (NM_000267.3(NF1):c.2T>C(p.Met1Thr)); not provided (NM_000277.2(PAH):c.1249T>C(p.Tyr417His)); not provided (NM_000277.2(PAH):c.2T>C(p.Met1Thr)); Aniridia 1 (NM_000280.4(PAX6):c.1A>G(p.Met1Val)); not provided (NM_000424.3(KRT5):c.1A>G(p.Met1Val)); Enlarged vestibular aqueduct; Pendred's syndrome (NM_000441.1(SLC26A4):c.2T>C(p.Met1Thr)); Metachromatic leukodystrophy (NM_000487.5(ARSA):c.674A>G(p.Tyr225Cys)); Tay-Sachs disease; not provided (NM_000520.5(HEXA):c.2T>C(p.Met1Thr)); Familial hypercholesterolemia (NM_000527.4(LDLR):c.248T>C(p.Ile83Thr)); Maturity-onset diabetes of the young, type 3 (NM_000545.6(HNF1A):c.1A>G(p.Met1Val)); Pseudoxanthoma elasticum (NM_001171.5(ABCC6):c.3380T>C(p.Met1127Thr)); Cortical dysplasia, complex, with other brain malformations 1 (NM_001197181.1(TUBB3):c.751A>G(p.Met251Val)); Cortical dysplasia, complex, with other brain malformations 1 (NM_001197181.1(TUBB3):c.946A>G(p.Met316Val)); Osteopetrosis autosomal dominant type 2; Osteopetrosis autosomal recessive 4 (NM_001287.5(CLCN7):c.296A>G(p.Tyr99Cys)); Bleeding disorder, platelet-type, 21 (NM_002017.4(FLI1):c.1028A>G(p.Tyr343Cys)); Generalized epilepsy and paroxysmal dyskinesia (NM_002247.3(KCNMA1):c.2984A>G(p.Asn995Ser)); Spastic paraplegia 7 (NM_003119.3(SPG7):c.2228T>C(p.Ile743Thr)); Mitochondrial short-chain enoyl-coa hydratase 1 deficiency (NM_004092.3(ECHS1):c.176A>G(p.Asn59Ser)); not provided (NM_004321.7(KIF1A):c.1040A>G(p.Tyr347Cys)); not provided (NM_004369.3(COL6A3):c.6309+3A>G); Rubinstein-Taybi syndrome (NM_004380.2(CREBBP):c.5614A>G(p.Met1872Val)); Glycogen storage disease, type V (NM_005609.3(PYGM):c.1A>G(p.Met1Val)); Leukodystrophy, hypomyelinating, 6 (NM_006087.3(TUBB4A):c.1162A>G(p.Met388Val)); Epileptic encephalopathy, early infantile, 58 (NM_006180.4(NTRK2):c.1301A>G(p.Tyr434Cys)); Craniosynostosis 4 (NM_006494.3(ERF):c.1A>G(p.Met1Val)); Spinocerebellar ataxia 28 (NM_006796.2(AFG3L2):c.1997T>C(p.Met666Thr)); Helix syndrome (NM_006984.4(CLDN10):c.2T>C(p.Met1Thr)); Pseudo hypoaldosteronism, type 2 (NM_017415.2(KLHL3):c.232A>G(p.Met78Val)); Combined oxidative phosphorylation deficiency 26 (NM_020810.3(TRMT5):c.1156A>G(p.Met386Val)); not provided (NM_022168.3(IFIH1):c.1328A>G(p.Asp443Gly)); Blepharophimosis, ptosis, and epicanthus inversus (NM_023067.3(FOXL2):c.644A>G(p.Tyr215Cys)); Brown-Vialetto-Van Laere syndrome 1 (NM_033409.3(SLC52A3):c.224T>C(p.Ile75Thr)); Methylmalonic aciduria cblB type (NM_052845.3(MMAB):c.2T>C(p.Met1Thr)); 4-Alpha-hydroxyphenylpyruvate hydroxyladeficiency (NM_002150.2(HPD):c.97G>A(p.Ala33Thr)); Phenylketonuria, Hyperphenylalaninemia, nonpku (NM_000277.1(PAH):c.1241A>G(p.Tyr414Cys)); Leber congenital amaurosis 13 (NM_152443.2(RDH12):c.677A>G(p.Tyr226Cys)); alpha Thalassemia (NM_000518.4(HBB):c.59A>G(p.Asn20Ser)); Juvenile retinoschisis (NM_000330.3(RS1):c.286T>C(p.Trp96Arg)); Deficiency of UDPglucose-hexose-1-phosphateuridylyltransferase (NM_000155.3(GALT):c.290A>G(p.Asn97Ser)); Brown-Vialetto-Van laere syndrome (NM_033409.3(SLC52A3):c.1238T>C(p.Val413A1a)); Primary pulmonary hypertension (NM_000020.2(ACVRL1):c.293A>G(p.Asn98Ser)); Congenital long QT syndrome (NM_000238.3(KCNH2):c.1886A>G(p.Asn629Ser)); MYH-associated polyposis (NM_001128425.1(MUTYH):c.713A>G(p.Asn238Ser)); Porokeratosis 7, multiple types (NM_002461.2(MVD):c.875A>G(p.Asn292Ser)); Lissencephaly 3 (NM_006009.3(TUBA1A):c.1226T>C(p.Val409Ala)); Hereditary Nonpolyposis Colorectal Neoplasms (NM_000179.2(MSH6):c.1346T>C(p.Leu449Pro; NM_000041.3(APOE):c.137T>C(p.Leu46Pro)); Maturity-onset diabetes of the young, type 3 (NM_000545.6(HNF1A):c.1720G>A(p.Gly574Ser)); Ischiopatellar dysplasia (NM_018488.2(TBX4):c.1592A>G(p.Gln531Arg)); Immunoglobulin A deficiency 2, Common variable immunodeficiency 2 (NM_012452.2(TNFRSF13B):c.310T>C(p.Cys104Arg)); Beta thalassemia intermedia (NM_000518.4(HBB):c.344T>C(p.Leu115Pro)); Stargardt disease, Cone rod dystrophy 3 (NM_000350.2(ABCA4):c.5819T>C(p.Leu1940Pro)); not provided (NM_000531.5(OTC):c.988A>G(p.Arg330Gly)); Anonychia (NM_001029871.3(RSPO4):c.194A>G(p.Gln65Arg)); Hypogonadotropic hypogonadism 17 with or without anosmia (NM_030964.3(SPRY4):c.530A>G(p.Lys177Arg)); Glucose-6-phosphate transport defect (NM_001164277.1(SLC37A4):c.352T>C(p.Trp118Arg)); Arthrogryposis multiplex congenita, distal, X linked (NM_003334.3(UBA1):c.1639A>G(p.Ser547Gly)); Deafness, autosomal recessive 9 (NM_194248.2(OTOF):c.3032T>C(p.Leu1011Pro)); Familial cancer of breast, Breast-ovarian cancer, familial 1 (NM_007294.3(BRCA1):c.5291T>C(p.Leu1764Pro)); Lattice corneal dystrophy Type III (NM_002353.2(TACSTD2):c.557T>C(p.Leu186Pro)); Familial cancer of breast, Breast cancer, familial 2-ovarian (NM_000059.3(BRCA2):c.7958T>C(p.Leu2653Pro)); Ganglioside sialidase deficiency (NM_020533.2(MCOLN1):c.406-2A>G); Smith-Magenis syndrome (NM_030665.3(RAI1):c.4685A>G(p.Gln1562Arg)); Danon disease (NM_001122606.1(LAMP2):c.961T>C(p.Trp321Arg)); Allan-Herndon-Dudley syndrome (NM_006517.4(SLC16A2):c.1313T>C(p.Leu438Pro)); Juvenile retinoschisis (NM_000330.3(RS1):c.38T>C(p.Leu13Pro)); TNF receptor syndrome (TRAPS)-associated periodic fever (NM_001065.3(TNFRSF1A):c.175T>C(p.Cys59Arg)); Usher syndrome, type 1 (NM_000260.3(MYO7A):c.1344-2A>G); Hereditary pancreatitis (NM_002769.4(PRSS1):c.68A>G(p.Lys23Arg)); 46, XY gonadal dysgenesis, complete, DHH-related (NM_021044.2(DHH):c.485T>C(p.Leu162Pro)); X-linked severe combined immunodeficiency (NM_000206.2(IL2RG):c.343T>C(p.Cys115Arg)); Deficiency of UDPglucose-hexose-1-phosphateuridylyltransferase (NM_000155.3(GALT):c.677T>C(p.Leu226Pro)); Cystinosis (NM_004937.2(CTNS):c.473T>C(p.Leu158Pro)); Mitochondrial complex I deficiency (NM_025152.2(NUBPL):c.815-27T>C); Hyperlipoproteinemia, type I (NM_000237.2(LPL):c.337T>C(p.Trp113Arg)); Holocarboxylase synthetase deficiency (NM_000411.6(HLCS):c.710T>C(p.Leu237Pro)); Congenital disorder of glycosylation type 1D (NM_005787.5(ALG3):c.211T>C(p.Trp71Arg)); Marinesco-Sjögren syndrome (NM_001037633.1(SIL1):c.1370T>C(p.Leu457Pro)); Isovaleric acidemia, type I (NM_002225.3(IVD):c.134T>C(p.Leu45Pro)); AICAR transformylase/IMP cyclohydrolase deficiency (NM_004044.6(ATIC):c.1277A>G(p.Lys426Arg)); Neoplasm of stomach (NM_001128425.1(MUTYH):c.1241A>G(p.Gln414Arg)); Primary hyperoxaluria, type I (NM_000030.2(AGXT):c.613T>C(p.Ser205Pro)); Spondyloepiphyseal dysplasia with congenital joint dislocations (NM_004273.4(CHST3):c.920T>C(p.Leu307Pro)); Osteopetrosis autosomal recessive 7 (NM_003839.3(TNFRSF11A):c.508A>G(p.Arg170Gly)); Severe combined immunodeficiency due to ADA deficiency (NM_000022.2(ADA):c.320T>C(p.Leu107Pro)); Progressive pseudo rheumatoid dysplasia (NM_003880.3(WISP3):c.232T>C(p.Cys78Arg)); Generalized epilepsy with febri type 7, not specified le seizures plus (NM_002977.3(SCN9A):c.1964A>G(p.Lys655Arg)); Centromeric instability of chromosomes 1, 9 and 16 and immunodeficiency (NM_006892.3(DNMT3B):c.808T>C(p.Ser270Pro)); Bartter syndrome type 3 (NM_000085.4(CLCNKB):c.1294T>C(p.Tyr432His); (NM_001300.5(KLF6):c.506T>C(p.Leu169Pro)); Acid-labile subunit deficiency (NM_004970.2(IGFALS):c.1618T>C(p.Cys540Arg)); Nemaline myopathy 3 (NM_001100.3(ACTA1):c.287T>C(p.Leu96Pro)); Glucocorticoid resistance, generalized (NM_001018077.1(NR3C1):c.2209T>C(p.Phe737Leu)); Pseudohypoaldosteronism type 1 autosomal (NM_000901.4(NR3C2):c.2327A>G(p.Gln776Arg)); Sucrase-isomaltase deficiency (NM_001041.3(SI):c.1859T>C(p.Leu620Pro)); Oculocutaneous albinism type 4 (NM_016180.4(SLC45A2):c.1082T>C(p.Leu361Pro)); Merosin deficient congenital muscular dystrophy (NM_000426.3(LAMA2):c.7691T>C(p.Leu2564Pro)); Bile acid malabsorption, primary (NM_000452.2(SLC10A2):c.728T>C(p.Leu243Pro)); Infantile hypophosphatasia (NM_000478.4(ALPL):c.1306T>C(p.Tyr436His)); Infantile hypophosphatasia (NM_000478.4(ALPL):c.979T>C(p.Phe327Leu)); Gaucher disease, atypical, due to saposin C deficiency (NM_001042465.1(PSAP):c.1055T>C(p.Leu352Pro)); Spinocerebellar ataxia 5 (NM_006946.2(SPTBN2):c.758T>C(p.Leu253Pro)); Hereditary pyro poikilocytosis, Elliptocytosis 2 (NM_003126.2(SPTA1):c.620T>C(p.Leu207Pro)); Methemoglobinemia type 1 (NM_000398.6(CYB5R3):c.446T>C(p.Leu149Pro)); X-linked agammaglobulinemia (NM_000061.2(BTK):c.1223T>C(p.Leu408Pro)); Severe congenital neutropenia X-linked (NM_000377.2(WAS):c.809T>C(p.Leu270Pro)); Glycogen storage disease, type IV (NM_000158.3(GBE1):c.671T>C(p.Leu224Pro)); Glanzmann thrombasthenia (NM_000419.3(ITGA2B):c.641T>C(p.Leu214Pro)); Retinitis pigmentosa 46 (NM_006899.3(IDH3B):c.395T>C(p.Leu132Pro)); Desbuquois syndrome (NM_001159772.1(CANT1):c.671T>C(p.Leu224Pro)); Primary hyperoxaluria, type I (NM_000030.2(AGXT):c.449T>C(p.Leu150Pro)); Primary hyperoxaluria, type I (NM_000030.2(AGXT):c.757T>C(p.Cys253Arg)); Primary hyperoxaluria, type I (NM_000030.2(AGXT):c.893T>C(p.Leu298Pro)); Sialidosis, type II (NM_000434.3(NEU1):c.1088T>C(p.Leu363Pro)); Permanent neonatal diabetes mellitus (NM_000352.4(ABCC8):c.404T>C(p.Leu135Pro)); Dyskeratosis congenita X-linked (NM_001363.4(DKC1):c.941A>G(p.Lys314Arg)); Gorlin syndrome, Holoprosencephaly 7 (NM_000264.3 (PTCH1):c.2479A>G(p.Ser827Gly)); Cytochrome-c oxidase deficiency, Mitochondrial complex I deficiency (m.5728T>C); Hemolytic anemia, nonspherocytic, due to glucose phosphate isomerase deficiency (NM_000175.3(GPI):c.1028A>G(p.Gln343Arg)); Myoclonic epilepsy, familial infantile (NM_001199107.1(TBC1D24):c.751T>C(p.Phe251Leu)); Norum disease (NM_000229.1(LCAT):c.508T>C(p.Trp170Arg)); Early infantile epileptic encephalopathy 2 (NM_003159.2(CDKL5):c.659T>C(p.Leu220Pro)); Joubert syndrome 13 (NM_024549.5(TCTN1):c.221-2A>G); Leigh disease (NC 012920.1:m.5559A>G); Primary familial hypertrophic cardiomyopathy, Familial hypertrophic cardiomyopathy 4, Cardiomyopathy (NM_000256.3 (MYBPC3):c.26-2A>G); Nephronophthisis 16 (NM_173551.4(ANKS6):c.1322A>G(p.Gln441Arg)); Cystic fibrosis (NM_000492.3(CFTR):c.3717+4A>G); Aortic aneurysm, familial thoracic 4 (NM_001040113.1(MYH11):c.3791T>C(p.Leu1264Pro)); Peroxisome biogenesis disorder 4B (NM_000287.3(PEX6):c.1601T>C(p.Leu534Pro)); Preeclampsia/eclampsia 5 (NM_006587.3(CORIN):c.1414A>G(p.Ser472Gly); (NM_004453.3(ETFDH):c.1130T>C(p.Leu377Pro)); Pityriasis rubra pilaris (NM_024110.4(CARD14):c.467T>C(p.Leu156Pro)); Short stature, onychodysplasia, facial dysmorphism, and hypotrichosis (NM_001161581.1(POC1A):c.398T>C(p.Leu133Pro)); Porokeratosis, disseminated superficial actinicl (NM_000431.3(MVK):c.122T>C(p.Leu41Pro)); Deafness, autosomal recessive 89 (NM_001130089.1(KARS):c.517T>C(p.Tyr173His)); Dyschromatosis universalis hereditaria 3 (NM_005689.2(ABCB6):c.508A>G(p.Ser170Gly)); Permanent neonatal diabetes mellitus (NM_000207.2(INS):c.*59A>G); Deafness, autosomal recessive 9 (NM_194248.2(OTOF):c.3413T>C(p.Leu1138Pro)); Familial hypertrophic cardiomyopathy 4, Cardiomyopathy (NM_000256.3(MYBPC3):c.1224-2A>G); Parkinson disease 19, juvenile-onset (NM_001256864.1(DNAJC6):c.801-2A>G); Hypobetalipoproteinemia, familial, 2 (NM_014495.3(ANGPTL3):c.883T>C(p.Phe295Leu)); Kabuki make-up syndrome (NM_003482.3(KMT2D):c.5645-2A>G); Glycogen storage disease type 1A (NM_000151.3(G6PC):c.230+4A>G); Enamel-renal syndrome (NM_017565.3(FAM20A):c.590-2A>G); Activated PI3K-delta syndrome (NM_005026.3(PIK3CD):c.1246T>C(p.Cys416Arg)); Sialic acid storage disease, severe infantile type (NM_012434.4(SLC17A5):c.500T>C(p.Leu167Pro)); not provided (NM_003159.2(CDKL5):c.602T>C(p.Leu201Pro)); Heterotopia (NM_178151.2(DCX):c.683T>C(p.Leu228Pro)); Severe X-linked myotubular myopathy (NM_000252.2(MTM1):c.550A>G(p.Arg184Gly)); Orofaciodigital syndrome 6 (NM_023073.3(C5orf42):c.3290-2A>G); Hereditary diffuse leukoencephalopathy with spheroids (NM_005211.3(CSF1R):c.2655-2A>G); Familial hypertrophic cardiomyopathy 4 (NM_000256.3(MYBPC3):c.2906-2A>G); Familial hypercholesterolemia (NM_000527.4(LDLR):c.1468T>C(p.Trp490Arg)); Cardiomyopathy (NM_000257.3(MYH7):c.617A>G(p.Lys206Arg)); Rasopathy (NM_002880.3(RAF1):c.1279A>G(p.Ser427Gly)); Limb-girdle muscular dystrophy, type 2B (NM_003494.3(DYSF):c.1285-2A>G); Achromatopsia 5 (NM_006204.3(PDE6C):c.1483-2A>G); Retinitis pigmentosa 71 (NM_015662.2(IFT172):c.770T>C(p.Leu257Pro)); Congenital disorder of glycosylation type 1K (NM_019109.4(ALG1):c.1188-2A>G); not provided (NM_172107.2(KCNQ2):c.848A>G(p.Lys283Arg)); not provided (NM_014191.3(SCN8A):c.4889T>C(p.Leu1630Pro)); not provided (NM_000391.3(TPP1):c.833A>G(p.Gln278Arg)); Leukoencephalopathy with vanishing white matter, Ovarioleukodystrophy (NM_014239.3(EIF2B2):c.638A>G(p.Glu213Gly)); Primary hyperoxaluria, type I (NM_000030.2(AGXT):c.1076T>C(p.Leu359Pro)); Deafness, nonsyndromic sensorineural, mitochondrial (m.7443A>G); Pulmonary arterial hypertension related to hereditary hemorrhagic telangiectasia (NM_000020.2(ACVRL1):c.1195T>C(p.Trp399Arg)); not provided (NM_000070.2(CAPN3):c.2185-2A>G); not provided (NM_000101.3(CYBA):c.155T>C(p.Leu52Pro)); not provided (NM_000138.4(FBN1):c.6772T>C(p.Cys2258Arg)); not provided (NM_000138.4(FBN1):c.6872-2A>G); Hereditary cancer-predisposing syndrome; Lynch syndrome (NM_000179.2(MSH6):c.3632T>C(p.Leu1211Pro)); not provided (NM_000193.3(SHH):c.592T>C(p.Cys198Arg)); not provided (NM_000199.3(SGSH):c.1139A>G(p.Gln380Arg)); Mucopolysaccharidosis, MPS-III-A (NM_000199.3(SGSH):c.673T>C(p.Phe225Leu)); Hereditary cancer-predisposing syndrome; Lynch syndrome (NM_000249.3(MLH1):c.2246T>C(p.Leu749Pro)); Methylmalonic aciduria due to methyl malonyl-CoA mutase deficiency (NM_000255.3(MUT):c.1853T>C(p.Leu618Pro)); Cardiovascular phenotype; Hypertrophic cardiomyopathy; Primary familial hypertrophic cardiomyopathy (NM_000256.3(MYBPC3):c.2309-2A>G); not provided (NM_000264.4(PTCH1):c.1348-2A>G); not provided (NM_000267.3(NF1):c.4270-2A>G); not provided (NM_000359.2(TGM1):c.877-2A>G); Polyglandular autoimmune syndrome, type 1 (NM_000383.3(AIRE):c.232T>C(p.Trp78Arg)); Sphingomyelin/cholesterol lipidosis, Niemann Pick disease, type A, Niemann-Pick disease, type B (NM_000543.4(SMPD1):c.911T>C(p.Leu304Pro)); not provided (NM_000435.2(NOTCH3):c.1597T>C(p.Cys533Arg)); Retinitis pigmentosa 43 (NM_000440.2(PDE6A):c.1408-2A>G); alpha Thalassemia; not specified (NM_000517.4(HBA2):c.*94A>G); Hemolytic anemia (NM_000518.4(HBB):c.127T>C(p.Phe43Leu)); Familial hypercholesterolemia (NM_000527.4(LDLR):c.1102T>C(p.Cys368Arg)); Familial hypercholesterolemia (NM_000527.4(LDLR):c.1154T>C(p.Leu385Pro)); Familial hypercholesterolemia (NM_000527.4(LDLR):c.1207T>C(p.Phe403Leu)); Familial hypercholesterolemia (NM_000527.4(LDLR):c.1468T>C(p.Trp490Arg)); Familial hypercholesterolemia (NM_000527.4(LDLR):c.166T>C(p.Ser56Pro)); Familial hypercholesterolemia (NM_000527.4(LDLR):c.382T>C(p.Cys128Arg)); Familial hypercholesterolemia (NM_000527.4(LDLR):c.691T>C(p.Cys231Arg)); Familial hypercholesterolemia (NM_000527.4(LDLR):c.985T>C(p.Cys329Arg)); Hereditary cancer-predisposing syndrome; Li-Fraumeni syndrome (NM_000546.5(TP53):c.920-2A>G); Tuberous sclerosis syndrome (NM_000548.4(TSC2):c.226-2A>G); Tuberous sclerosis syndrome (NM_000548.4(TSC2):c.2546-2A>G); not provided; von Willebrand disease, type 2a (NM_000552.4(VWF):c.3814T>C(p.Cys1272Arg)); Short-rib polydactyly syndrome type III (NM_001080463.1(DYNC2H1):c.6866T>C(p.Leu2289Pro)); Joubert syndrome 9 (NM_001080522.2(CC2D2A):c.1676T>C(p.Leu559Pro)); Abnormality of neuronal migration (NM_001083961.1(WDR62):c.2030T>C(p.Leu677Pro)); Patent ductus arteriosus 3 (NM_001136239.3(PRDM6):c.1385A>G(p.Gln462Arg)); Encephalopathy, neonatal severe, with lactic acidosis and brain abnormalities (NM_001144869.2(LIPT2):c.89T>C(p.Leu30Pro)); Pseudoxanthoma elasticum (NM_001171.5(ABCC6):c.1192A>G(p.Ser398Gly)); Pseudoxanthoma elasticum (NM_001171.5(ABCC6):c.2018T>C(p.Leu673Pro)); Pseudoxanthoma elasticum (NM_001171.5(ABCC6):c.3715T>C(p.Tyr1239His)); Pseudoxanthoma elasticum (NM_001171.5(AB CC6):c.601-2A>G); Digitorenocerebral syndrome (NM_001199107.1(TBC1D24):c.313T>C(p.Cys105Arg)); Mitochondrial DNA depletion syndrome 1 (MNGIE type) (NM_001257988.1(TYMP):c.1112T>C(p.Leu371Pro)); leukodystrophy, progressive, early childhood-onset (NM_001300953.1(ACER3):c.98A>G(p.Glu33Gly)); Cirrhosis, cryptogenic (NM_002273.3(KRT8):c.160T>C(p.Tyr54His)); not provided (NM_002294.2(LAMP2):c.929-2A>G); Congenital cystic disease of liver (NM_002743.3 (PRKCSH):c.1341-2A>G); Neurodegeneration with brain iron accumulation 2b (NM_003560.3(PLA2G6):c.1349-2A>G); Glycosylphosphatidylinositol biosynthesis defect 15 (NM_003801.3(GPAA1):c.869T>C(p.Leu290Pro)); Glycosylphosphatidylinositol biosynthesis defect 15 (NM_003801.3(GPAA1):c.872T>C(p.Leu291Pro)); Mitochondrial short-chain enoyl-coa hydratase 1 deficiency; not provided (NM_004092.3(ECHS1):c.476A>G(p.Gln159Arg)); Focal cortical dysplasia type II (NM_004958.3(MTOR):c.7280T>C(p.Leu2427Pro)); Chromosome Xq28 deletion syndrome (NM_005745.7(BCAP31):c.194-2A>G); Senior-Loken syndrome 7 (NM_006642.4(SDCCAG8):c.221-2A>G); Mental retardation, autosomal dominant 5 (NM_006772.2(SYNGAP1):c.388-2A>G); Epilepsy, early-onset, vitamin b6-dependent (NM_007198.3(PLPBP):c.320-2A>G); Hereditary breast and ovarian cancer syndrome (NM_007294.3(BRCA1):c.4186-2A>G); Breast-ovarian cancer, familial 1 (NM_007294.3(BRCA1):c.81-2A>G); Neurodevelopmental disorder with or without hyperkinetic movements and seizures, autosomal dominant (NM_007327.3(GRIN1):c.2449T>C(p.Phe817Leu)); not provided (NM_015284.3(SZT2):c.8655-2A>G); Anosmia; Arhinia choanal atresia microphthalmia (NM_015295.2(SMCHD1):c.1034A>G(p.Gln345Arg)); Joubert syndrome (NM_019892.5(INPP5E):c.1684A>G(p.Ser562Gly)); MEN2 phenotype: Unclassified (NM_020630.4(RET):c.1831T>C(p.Cys611Arg)); Posterior polymorphous corneal dystrophy 1 (NM_021220.3(OVOL2):c.-370T>C); Joubert syndrome 5; Meckel syndrome type 4 (NM_025114.3(CEP290):c.181-2A>G); Inborn genetic diseases; Mitochondrial complex I deficiency (NM_025152.2(NUBPL):c.311T>C(p.Leu104Pro)); Pseudo hypoaldosteronism type 2B (NM_032387.4(WNK4):c.1679A>G(p.Glu560Gly)); Congenital generalized lipodystrophy type 2 (NM_032667.6(BSCL2):c.672-2A>G); Verheij syndrome (NM_078480.2(PUF60):c.1381-2A>G); not provided (NM_144997.5(FLCN):c.1177-2A>G); Early infantile epileptic encephalopathy 7 (NM_172107.3(KCNQ2):c.1024-2A>G); Early infantile epileptic encephalopathy 7 (NM_172107.3(KCNQ2):c.1203T>C(p.Ser401=)); Spondyloepiphyseal dysplasia; Spondyloepiphyseal dysplasia—Sutcliffe type (NM_212482.2(FN1):c.367T>C(p.Cys123Arg)); Pyridoxal 5-phosphate-dependent epilepsy (NM_018129.3 (PNPO):c.784T>C(p.Ter262Gln)); Mucopolysaccharidosis, MPS-II (NM_000202.6(IDS):c.404A>G(p.Lys135Arg)); Dyskeratosis congenita autosomal recessive 1, Dyskeratosis congenita, autosomal recessive 2 (NM_017838.3(NHP2):c.415T>C(p.Tyr139His)); Idiopathic fibro sing alveolitis, chronic form (NM_001098668.2(SFTPA2):c.593T>C(p.Phe198Ser)); Isolated growth hormone deficiency type 1B (NM_000823.3(GHRHR):c.985A>G(p.Lys329Glu)); Congenital myopathy with fiber type disproportion (NM_152263.3(TPM3):c.505A>G(p.Lys169Glu)); Axenfeld-Rieger syndrome type 1 (NM_153427.2(PITX2):c.262A>G(p.Lys88Glu)); Intrauterine growth retardation, metaphyseal dysplasia, adrenal hypoplasia congenita, and genital anomalies (NM_000076.2(CDKN1C):c.832A>G(p.Lys278 Glu)); Boucher Neuhauser syndrome NM_006702.4(PNPLA6):c.3053T>C(p.Phe1018Ser)); Palmoplantar keratoderma, mutilating, with periorificial keratotic plaques, X-linked (NM_015884.3(MBTPS2):c.1391T>C(p.Phe464Ser)); not provided (NM_001165963.1(SCN1A):c.1094T>C(p.Phe365Ser)); Deafness, autosomal recessive 7 (NM_138691.2(TMC1):c.1543T>C(p.Cys515Arg)); Congenital heart disease (NM_002052.4(GATA4):c.1147-107A>G); Ornithine carbamoyl transferase deficiency (NM_000531.5(OTC):c.238A>G(p.Lys80Glu)); not provided (NM_006245.3(PPP2R5D):c.619T>C(p.Trp207Arg)); Deficiency of UDPglucose-hexose-1-phosphateuridylyltransferase (NM_000155.3(GALT):c.499T>C(p.Trp167Arg); (m.4290T>C); Congenital muscular dystrophy, LMNA-rel (NM_170707.3(LMNA):c.1139T>C(p.Leu380Ser)); Crouzon syndrome (NM_000141.4(FGFR2):c.874A>G(p.Lys292Glu)); Homocystinuria, pyridoxine-responsive (NM_000071.2(CBS):c.1150A>G(p.Lys384Glu)); X-linked agammaglobulinemia (NM_000061.2(BTK):c.1288A>G(p.Lys430Glu)); Macular dystrophy, vitelliform, 5 (NM_016247.3(IMPG2):c.370T>C(p.Phe124Leu)); Bullous ichthyosiform erythroderma (NM_000421.3(KRT10):c.1315A>G(p.Lys439Glu)); Dominant hereditary optic atrophy (NM_015560.2(OPA1):c.1310A>G(p.Gln437Arg)); Astrocytoma; Encephalocraniocutaneous lipomatosis; Glioblastoma; Hepatocellular carcinoma; Lymphoblastic leukemia, acute, with lymphomatous features; Medulloblastoma; Transitional cell carcinoma of the bladder (NM_023110.2(FGFR1):c.1966A>G(p.Lys656Glu)); Limb-girdle muscular dystrophy, type 2L (NM_213599.2(ANO5):c.1733T>C(p.Phe578Ser)); Leber optic atrophy (m.3394T>C); not provided (NM_000531.5(OTC):c.541-2A>G); Borjeson-Forssman-Lehmann syndrome (NM_001015877.1(PHF6):c.769A>G(p.Arg257Gly)); Deficiency of UDPglucose-hexo se-1-phosphateuridylyltransferase (NM_000155.3 (GALT):c.482 T>C (p.Leu161Pro)); Atrial fibrillation, familial, 3, Atrial fibrillation (NM_000218.2(KCNQ1):c.418A>G(p.Ser140Gly)); Cardiomyopathy, mitochondrial (m.12297T>C); Cerebro-oculo-facio-skeletal syndrome (NM_000124.3(ERCC6):c.2960T>C(p.Leu987Pro)); Hereditary factor VIII deficiency disease (NM_000132.3 (F8):c.1660A>G(p.Ser554Gly)); Leukocyte adhesion deficiency (NM_000211.4(ITGB2):c.446T>C(p.Leu149Pro)); Short-rib thoracic dysplasia 3 with or without polydactyly (NM_001080463.1(DYNC2H1):c.4610A>G(p.Gln1537Arg)); Adult neuronal ceroid lipofuscinosis (NM_017882.2(CLN6):c.200T>C(p.Leu67Pro)); Mucolipidosis III Gamma (NM_032520.4(GNPTG):c.610-2A>G); Marie Unna hereditary hypotrichosis 1 (NM_005144.4(HR):c.-218A>G); Hereditary diffuse leukoencephalopathy with spheroids (NM_005211.3(CSF1R):c.2320-2A>G); Combined oxidative phosphorylation deficiency 5 (NM_020191.2(MRPS22):c.644T>C(p.Leu215Pro)); Retinitis pigmentosa, Usher syndrome, type 2A (NM_206933.2(USH2A):c.8559-2A>G); Hemophagocytic lymph histiocytosis, familial, (NM_003764.3(STX11):c.173T>C(p.Leu58Pro)); Crigler Najjar syndrome, type 1 (NM_000463.2(UGT1A1):c.1085-2A>G; NG 012088.1:g.2209A>G); Tumor predisposition syndrome (NM_004656.3(BAP1):c.438-2A>G); Spastic paraplegia 4, autosomal dominant (NM_014946.3(SPAST):c.1688-2A>G); Hereditary cancer-predisposing syndrome, Carcinoma of colon (NM_001128425.1(MUTYH):c.1187-2A>G); Familial adenomatous polyposis 1 (NM_000038.5(APC):c.1744-2A>G); Supravalvar aortic stenosis (NM_000501.3(ELN):c.890-2A>G); Combined immunodeficiency (NM_006785.3 (MALT1):c.1019-2A>G); Severe myoclonic epilepsy in infancy (NM_001165963.1(SCN1A):c.4055T>C(p.Leu1352Pro)); Medium-chain acyl-coenzyme A dehydrogenase deficiency (NM_000016.5(ACADM):c.742A>G(p.Arg248 Gly)); Mucopolysaccharidosis, MPS-II (NM_000202.7(IDS):c.1016T>C(p.Leu339Pro)); Myopathy, distal, 1 (NM_000257.3 (MYH7):c.5117T>C(p.Leu1706Pro)); beta Thalassemia (NM_000518.4(HBB):c.316-2A>G); Familial hypercholesterolemia (NM_000527.4(LDLR):c.1187-2A>G); Hereditary cancer-predisposing syndrome; Li-Fraumeni syndrome (NM_000546.5(TP53):c.1101-2A>G); Mental retardation, autosomal dominant 6 (NM_000834.3(GRIN2B):c.2360-2A>G); Succinate-semialdehyde dehydrogenase deficiency (NM_001080.3(ALDH5A1):c.610-2A>G); Deafness, autosomal recessive 2 (NM_001127180.1(MYO7A):c.4153-2A>G); Primary pulmonary hypertension (NM_001204.6(BMPR2):c.1039T>C(p.Cys347Arg)); not provided (NM_003165.3 (STXBP1):c.1060T>C(p.Cys354Arg)); Smith-Magenis Syndrome-like (NM_004187.3(KDM5C):c.3068A>G(p Lys 1023Arg)); Pachyonychia congenita 3 (NM_005554.3(KRT6A):c.1406T>C(p.Leu469Pro)); not provided (NM_005629.3(SLC6A8):c.1255-2A>G); Breast-ovarian cancer, familial 1 (NM_007294.3(BRCA1):c.4097-2A>G); Retinitis pigmentosa 80 (NM_014714.3(IFT140):c.4196T>C(p.Leu1399Pro)); Congenital generalized lipodystrophy type 2 (NM_032667.6(BSCL2):c.574-2A>G); Hyperphosphatasia with mental retardation syndrome 4 (NM_033419.4(PGAP3):c.842T>C(p.Leu281Pro)); Gaucher disease, Subacute neuronopathic (NM_000157.3(GBA):c.680A>G(p.Asn227Ser)); Homocystinuria due to CBS deficiency, Homocystinuria, pyridoxine-responsive (NM_000071.2(CBS):c.833T>C(p.Ile278Thr)); Bernard Soulier syndrome, Bernard-Souliersyndrome type C (NM_000174.4(GP9):c.70T>C(p.Cys24Arg)); Congenital disorder of glycosylation type 1J (NM_001382.3(DPAGT1):c.509A>G(p.Tyr170Cys)); Tangier disease (NM_005502.3(ABCA1):c.2804A>G(p.Asn935Ser)); Age-related macular degeneration 3 (NM_006329.3(FBLN5):c.506T>C(p.Ile169Thr)); Cohen syndrome, not specified (NM_017890.4(VPS13B):c.8978A>G(p.Asn2993Ser)); Pachyonychia congenita type 2 (NM_000422.2(KRT17):c.275A>G(p.Asn92Ser)); von Willebrand disease type 2N (NM_000552.3(VWF):c.2384A>G(p.Tyr795Cys)); Frontotemporal dementia, ubiquitin-positive (NM_002087.3(GRN):c.2T>C(p.Met1Thr)); Nephrogenic diabetes insipidus, Nephrogenicdiabetes insipidus, X-linked (NM_000054.4(AVPR2):c.614A>G(p.Tyr205Cys)); Congenital myopathy with fiber type disproportion, Central core disease (NM_000540.2(RYR1):c.1205T>C(p.Met402Thr)); Diarrhea 3, secretory sodium, congenital, syndromic (NM_021102.3(SPINT2):c.488A>G(p.Tyr163Cys)); Cardiofaciocutaneous syndrome 3, Rasopathy (NM_002755.3(MAP2K1):c.389A>G(p.Tyr130Cys); NM_002427.3(MMP13):c.272T>C(p.Met91Thr)); Familial juvenile gout (NM_003361.3(UMOD):c.383A>G(p.Asn128Ser)); Hereditary factor VIII deficiency disease (NM_000132.3(F8):c.5372T>C(p.Met1791Thr)); L-ferritin deficiency (NM_000146.3(FTL):c.1A>G(p.Met1Val)); Spermatogenic failure, X-linked, 2 (NM_001003811.1(TEX11):c.511A>G(p.Met171Val)); not provided (NM_198056.2(SCN5A):c.1247A>G(p.Tyr416Cys)); Joubert syndrome 16 (NM_016464.4(TMEM138):c.287A>G(p.His96Arg)); Cornelia de Lange syndrome 5 (NM_018486.2(HDAC8):c.1001A>G(p.His334Arg)); Severe myoclonic epilepsy in infancy (NM_001165963.1(SCN1A):c.1048A>G(p.Met350Val)); not provided (NM_000833.4(GRIN2A):c.2449A>G(p.Met817Val)); not provided (NM_000032.4(ALAS2):c.1699A>G(p.Met567Val)); Androgen resistance syndrome (NM_000044.4(AR):c.2117A>G(p.Asn706Ser)); not provided (NM_000044.4(AR):c.2659A>G(p.Met887Val)); FGFR2 related craniosynostosis (NM_000141.4(FGFR2):c.314A>G(p.Tyr105Cys)); Deficiency of UDPglucose-hexose-1-phosphate uridylyltransferase (NM_000155.3 (GALT):c.460T>C(p.Trp154Arg)); Pseudohyperkalemia Cardiff (NM_000342.3(SLC4A1):c.2201A>G(p.His734Arg)); Stargardt disease 1 (NM_000350.2(ABCA4):c.2894A>G(p.Asn965Ser)); Metachromatic leukodystrophy (NM_000487.5(ARSA):c.1274A>G(p.His425Arg)); Combined immunodeficiency; Immunodeficiency 46 (NM_003234.3(TFRC):c.58T>C(p.Tyr20His)); Inclusion body myopathy 2; Nonaka myopathy (NM_005476.5(GNE):c.1760T>C(p.Ile587Thr)); Episodic pain syndrome, familial, 3 (NM_014139.2(SCN11A):c.1142T>C(p.Ile381Thr)); Meier-Gorlin syndrome 3 (NM_014321.3(ORC6):c.2T>C(p.Met1Thr)); Inborn genetic diseases; Spastic paraplegia 4, autosomal dominant (NM_014946.3(SPAST):c.1168A>G(p.Met390Val)); not provided (NM_015335.4(MED13L):c.1A>G(p.Met1Val)); Deafness, autosomal dominant 72 (NM_025257.2(SLC44A4):c.466A>G(p.Met156Val)); Ichthyosis, congenital, autosomal recessive 13 (NM_148897.2(SDR9C7):c.599T>C(p.Ile200Thr)); Mental retardation, X-linked 61; Non-syndromic X-linked intellectual disability (NM_183353.2(RLIM):c.1067A>G(p.Tyr356Cys)); Epileptic encephalopathy, early infantile, 53 (NM_203446.2(SYNJ1):c.2663A>G(p.Tyr888Cys)); Mucopolysaccharidosis, MPS-IV-A (NM_000512.4(GALNS):c.1460A>G(p.Asn487Ser)); Multiple epiphyseal dysplasia 3 (NM_001853.3(COL9A3):c.369+2T>C); Miyoshi muscular dystrophy 1 (NM_003494.3(DYSF):c.937+2T>C); Cardio-facio-cutaneous syndrome; Rasopathy (NM_030662.3(MAP2K2):c.401A>G(p.Tyr134Cys)). An initial screen of the target motif may be performed to determine which of the engineered A3G base editors should be used for any given pathogenic SNP correction.

### IV. METHODS OF ADMINISTRATION

[0076] Any suitable cell or mammal can be administered or treated by a method or use described herein. Typically, a mammal is in need of a method described herein, that is suspected of having or expressing an abnormal or aberrant protein as a result of a C to T conversion that is associated with a disease state.

[0077] Non-limiting examples of mammals include humans, non-human primates (e.g., apes, gibbons, chimpanzees, orangutans, monkeys, macaques, and the like), domestic animals (e.g., dogs and cats), farm animals (e.g., horses, cows, goats, sheep, pigs) and experimental animals (e.g., mouse, rat, rabbit, guinea pig). In certain embodiments a mammal is a human. In certain embodiments a mammal is a non-rodent mammal (e.g., human, pig, goat, sheep, horse, dog, or the like). In certain embodiments a non-rodent mammal is a human. A mammal can be any age or at any stage of development (e.g., an adult, teen, child, infant, or a mammal in utero). A mammal can be male or female. In certain embodiments a mammal can be an animal disease model, for example, animal models having or expressing an abnormal or aberrant protein that is associated with a disease state or animal models with insufficient expression of a protein, which causes a disease state.

[0078] Mammals (subjects) treated by a method or composition described herein include adults (18 years or older) and children (less than 18 years of age). Adults include the elderly. Representative adults are 50 years or older. Children range in age from 1-2 years old, or from 2-4, 4-6, 6-18, 8-10, 10-12, 12-15 and 15-18 years old. Children also include infants. Infants typically range from 1-12 months of age.

[0079] In certain embodiments, a method includes administering a plurality of viral particles or nanoparticles to a mammal as set forth herein, where severity, frequency, progression or time of onset of one or more symptoms of a disease state, decreased, reduced, prevented, inhibited or delayed. In certain embodiments, a method includes administering a plurality of viral particles or nanoparticles to a mammal to treat an adverse symptom of a disease state. In certain embodiments, a method includes administering a plurality of viral particles or nanoparticles to a mammal to stabilize, delay or prevent worsening, or progression, or reverse and adverse symptom of a disease state.

[0080] In certain embodiments a method includes administering a plurality of viral particles or nanoparticles to the patient, or portion thereof as set forth herein, of a mammal and severity, frequency, progression or time of onset of one or more symptoms of a disease state, are decreased, reduced, prevented, inhibited or delayed by at least about 5 to about 10, about 10 to about 25, about 25 to about 50, or about 50 to about 100 days.

[0081] In some embodiments, viral and non-viral based gene transfer methods can be used to introduce nucleic acids in mammalian cells or target tissues. Such methods can be used to administer nucleic acids encoding inhibitory RNAs, therapeutic proteins, or components of a CRISPR system to cells in culture, or in a host organism. Non-viral vector delivery systems include DNA plasmids, RNA (e.g. a transcript of a vector described herein), naked nucleic acid, and nucleic acid complexed with a delivery vehicle, such as a liposome. Viral vector delivery systems include DNA and RNA viruses, which have either episomal or integrated genomes after delivery to the cell. For a review of gene therapy procedures, see Anderson, 1992; Nabel & Feigner, 1993; Mitani & Caskey, 1993; Dillon, 1993; Miller, 1992; Van Brunt, 1988; Vigne, 1995; Kremer & Perricaudet, 1995; Haddada et al., 1995; and Yu et al., 1994.

[0082] Methods of non-viral delivery of nucleic acids include exosomes, lipofection, nucleofection, microinjection, biolistics, virosomes, liposomes, immunoliposomes, polycation or lipid:nucleic acid conjugates, naked DNA, artificial virions, and agent-enhanced uptake of DNA. Lipofection is described in (e.g., U.S. Pat. Nos. 5,049,386, 4,946,787; and 4,897,355) and lipofection reagents are sold commercially (e.g., Transfectam™ and Lipofectin™). Cationic and neutral lipids that are suitable for efficient receptor-recognition lipofection of polynucleotides include those of Feigner, WO 91117424; WO 91116024. Delivery can be to cells (e.g. in vitro or ex vivo administration) or target tissues (e.g. in vivo administration).

[0083] In some embodiments, delivery is via the use of RNA or DNA viral based systems for the delivery of nucleic acids. Viral vectors in some aspects may be administered directly to patients (in vivo) or they can be used to treat cells in vitro or ex vivo, and then administered to patients. Viral-based systems in some embodiments include retroviral, lentivirus, adenoviral, adeno-associated and herpes simplex virus vectors for gene transfer.

[0084] A. Viral Vectors

[0085] The term “vector” refers to small carrier nucleic acid molecule, a plasmid, virus (e.g., AAV vector, retroviral vector, lentiviral vector), or other vehicle that can be manipulated by insertion or incorporation of a nucleic acid. Vectors, such as viral vectors, can be used to introduce/transfer nucleic acid sequences into cells, such that the nucleic acid sequence therein is transcribed and, if encoding a protein, subsequently translated by the cells.

[0086] An “expression vector” is a specialized vector that contains a gene or nucleic acid sequence with the necessary regulatory regions needed for expression in a host cell. An expression vector may contain at least an origin of replication for propagation in a cell and optionally additional elements, such as a heterologous nucleic acid sequence, expression control element (e.g., a promoter, enhancer), intron, ITR(s), and polyadenylation signal.

[0087] A viral vector is derived from or based upon one or more nucleic acid elements that comprise a viral genome. Exemplary viral vectors include adeno-associated virus (AAV) vectors, retroviral vectors, and lentiviral vectors.

[0088] The term “recombinant,” as a modifier of vector, such as recombinant viral, e.g., lenti- or parvo-virus (e.g., AAV) vectors, as well as a modifier of sequences such as recombinant nucleic acid sequences and polypeptides, means that the compositions have been manipulated (i.e., engineered) in a fashion that generally does not occur in nature. A particular example of a recombinant vector, such as an AAV, retroviral, or lentiviral vector would be where a nucleic acid sequence that is not normally present in the wild-type viral genome is inserted within the viral genome. An example of a recombinant nucleic acid sequence would be where a nucleic acid (e.g., gene) encodes an inhibitory RNA cloned into a vector, with or without 5′, 3′ and/or intron regions that the gene is normally associated within the viral genome. Although the term “recombinant” is not always used herein in reference to vectors, such as viral vectors, as well as sequences such as polynucleotides, “recombinant” forms including nucleic acid sequences, polynucleotides, transgenes, etc. are expressly included in spite of any such omission.

[0089] A recombinant viral “vector” is derived from the wild type genome of a virus, such as AAV, retrovirus, or lentivirus, by using molecular methods to remove the wild type genome from the virus, and replacing with a non-native nucleic acid, such as a nucleic acid sequence. Typically, for example, for AAV, one or both inverted terminal repeat (ITR) sequences of the AAV genome are retained in the recombinant AAV vector. A “recombinant” viral vector (e.g., rAAV) is distinguished from a viral (e.g., AAV) genome, since all or a part of the viral genome has been replaced with a non-native sequence with respect to the viral genomic nucleic acid such a nucleic acid encoding a transactivator or nucleic acid encoding an inhibitory RNA or nucleic acid encoding a therapeutic protein. Incorporation of such non-native nucleic acid sequences therefore defines the viral vector as a “recombinant” vector, which in the case of AAV can be referred to as a “rAAV vector.”

[0090] 2. Adeno-Associated Virus

[0091] Adeno-associated virus (AAV) is a small nonpathogenic virus of the parvoviridae family. To date, numerous serologically distinct AAVs have been identified, and more than a dozen have been isolated from humans or primates. AAV is distinct from other members of this family by its dependence upon a helper virus for replication.

[0092] AAV genomes can exist in an extrachromosomal state without integrating into host cellular genomes; possess a broad host range; transduce both dividing and non-dividing cells in vitro and in vivo and maintain high levels of expression of the transduced genes. AAV viral particles are heat stable; resistant to solvents, detergents, changes in pH, and temperature; and can be column purified and/or concentrated on CsCl gradients or by other means. The AAV genome comprises a single-stranded deoxyribonucleic acid (ssDNA), either positive- or negative-sensed. The approximately 5 kb genome of AAV consists of one segment of single stranded DNA of either plus or minus polarity. The ends of the genome are short inverted terminal repeats (ITRs) that can fold into hairpin structures and serve as the origin of viral DNA replication.

[0093] An AAV “genome” refers to a recombinant nucleic acid sequence that is ultimately packaged or encapsulated to form an AAV particle. An AAV particle often comprises an AAV genome packaged with AAV capsid proteins. In cases where recombinant plasmids are used to construct or manufacture recombinant vectors, the AAV vector genome does not include the portion of the “plasmid” that does not correspond to the vector genome sequence of the recombinant plasmid. This non vector genome portion of the recombinant plasmid is referred to as the “plasmid backbone,” which is important for cloning and amplification of the plasmid, a process that is needed for propagation and recombinant virus production, but is not itself packaged or encapsulated into viral particles. Thus, an AAV vector “genome” refers to nucleic acid that is packaged or encapsulated by AAV capsid proteins.

[0094] The AAV virion (particle) is a non-enveloped, icosahedral particle approximately 25 nm in diameter. The AAV particle comprises an icosahedral symmetry comprised of three related capsid proteins, VP1, VP2 and VP3, which interact together to form the capsid. The right ORF often encodes the capsid proteins VP1, VP2, and VP3. These proteins are often found in a ratio of 1:1:10 respectively, but may be in varied ratios, and are all derived from the right-hand ORF. The VP1, VP2 and VP3 capsid proteins differ from each other by the use of alternative splicing and an unusual start codon. Deletion analysis has shown that removal or alteration of VP1 which is translated from an alternatively spliced message results in a reduced yield of infectious particles. Mutations within the VP3 coding region result in the failure to produce any single-stranded progeny DNA or infectious particles.

[0095] An AAV particle is a viral particle comprising an AAV capsid. In certain embodiments, the genome of an AAV particle encodes one, two or all VP1, VP2 and VP3 polypeptides.

[0096] The genome of most native AAVs often contain two open reading frames (ORFs), sometimes referred to as a left ORF and a right ORF. The left ORF often encodes the non-structural Rep proteins, Rep 40, Rep 52, Rep 68 and Rep 78, which are involved in regulation of replication and transcription in addition to the production of single-stranded progeny genomes. Two of the Rep proteins have been associated with the preferential integration of AAV genomes into a region of the q arm of human chromosome 19. Rep68/78 have been shown to possess NTP binding activity as well as DNA and RNA helicase activities. Some Rep proteins possess a nuclear localization signal as well as several potential phosphorylation sites. In certain embodiments the genome of an AAV (e.g., an rAAV) encodes some or all of the Rep proteins. In certain embodiments the genome of an AAV (e.g., an rAAV) does not encode the Rep proteins. In certain embodiments one or more of the Rep proteins can be delivered in trans and are therefore not included in an AAV particle comprising a nucleic acid encoding a polypeptide.

[0097] The ends of the AAV genome comprise short inverted terminal repeats (ITR) which have the potential to fold into T-shaped hairpin structures that serve as the origin of viral DNA replication. Accordingly, the genome of an AAV comprises one or more (e.g., a pair of) ITR sequences that flank a single stranded viral DNA genome. The ITR sequences often have a length of about 145 bases each. Within the ITR region, two elements have been described which are believed to be central to the function of the ITR, a GAGC repeat motif and the terminal resolution site (trs). The repeat motif has been shown to bind Rep when the ITR is in either a linear or hairpin conformation. This binding is thought to position Rep68/78 for cleavage at the trs which occurs in a site- and strand-specific manner. In addition to their role in replication, these two elements appear to be central to viral integration. Contained within the chromosome 19 integration locus is a Rep binding site with an adjacent trs. These elements have been shown to be functional and necessary for locus specific integration.

[0098] In certain embodiments, an AAV (e.g., a rAAV) comprises two ITRs. In certain embodiments, an AAV (e.g., a rAAV) comprises a pair of ITRs. In certain embodiments, an AAV (e.g., a rAAV) comprises a pair of ITRs that flank (i.e., are at each 5′ and 3′ end) of a nucleic acid sequence that at least encodes a polypeptide having function or activity.

[0099] An AAV vector (e.g., rAAV vector) can be packaged and is referred to herein as an “AAV particle” for subsequent infection (transduction) of a cell, ex vivo, in vitro or in vivo. Where a recombinant AAV vector is encapsulated or packaged into an AAV particle, the particle can also be referred to as a “rAAV particle.” In certain embodiments, an AAV particle is a rAAV particle. A rAAV particle often comprises a rAAV vector, or a portion thereof. A rAAV particle can be one or more rAAV particles (e.g., a plurality of AAV particles). rAAV particles typically comprise proteins that encapsulate or package the rAAV vector genome (e.g., capsid proteins). It is noted that reference to a rAAV vector can also be used to reference a rAAV particle.

[0100] Any suitable AAV particle (e.g., rAAV particle) can be used for a method or use herein. A rAAV particle, and/or genome comprised therein, can be derived from any suitable serotype or strain of AAV. A rAAV particle, and/or genome comprised therein, can be derived from two or more serotypes or strains of AAV. Accordingly, a rAAV can comprise proteins and/or nucleic acids, or portions thereof, of any serotype or strain of AAV, wherein the AAV particle is suitable for infection and/or transduction of a mammalian cell. Non-limiting examples of AAV serotypes include AAV1, AAV2, AAV3, AAV4, AAV5, AAV6, AAV7, AAV8, AAV9, AAV10, AAV11, AAV12, AAV-rh74, AAV-rh10 and AAV-2i8.

[0101] In certain embodiments a plurality of rAAV particles comprises particles of, or derived from, the same strain or serotype (or subgroup or variant). In certain embodiments a plurality of rAAV particles comprise a mixture of two or more different rAAV particles (e.g., of different serotypes and/or strains).

[0102] As used herein, the term “serotype” is a distinction used to refer to an AAV having a capsid that is serologically distinct from other AAV serotypes. Serologic distinctiveness is determined on the basis of the lack of cross-reactivity between antibodies to one AAV as compared to another AAV. Such cross-reactivity differences are usually due to differences in capsid protein sequences/antigenic determinants (e.g., due to VP1, VP2, and/or VP3 sequence differences of AAV serotypes). Despite the possibility that AAV variants including capsid variants may not be serologically distinct from a reference AAV or other AAV serotype, they differ by at least one nucleotide or amino acid residue compared to the reference or other AAV serotype.

[0103] In certain embodiments, a rAAV particle excludes certain serotypes. In one embodiment, a rAAV particle is not an AAV4 particle. In certain embodiments, a rAAV particle is antigenically or immunologically distinct from AAV4. Distinctness can be determined by standard methods. For example, ELISA and Western blots can be used to determine whether a viral particle is antigenically or immunologically distinct from AAV4. Furthermore, in certain embodiments a rAAV2 particle retains tissue tropism distinct from AAV4.

[0104] In certain embodiments, a rAAV vector based upon a first serotype genome corresponds to the serotype of one or more of the capsid proteins that package the vector. For example, the serotype of one or more AAV nucleic acids (e.g., ITRs) that comprises the AAV vector genome corresponds to the serotype of a capsid that comprises the rAAV particle.

[0105] In certain embodiments, a rAAV vector genome can be based upon an AAV (e.g., AAV2) serotype genome distinct from the serotype of one or more of the AAV capsid proteins that package the vector. For example, a rAAV vector genome can comprise AAV2 derived nucleic acids (e.g., ITRs), whereas at least one or more of the three capsid proteins are derived from a different serotype, e.g., an AAV1, AAV3, AAV4, AAV5, AAV6, AAV7, AAV8, AAV9, AAV10, AAV11, AAV12, Rh10, Rh74 or AAV-2i8 serotype or variant thereof.

[0106] In certain embodiments, a rAAV particle or a vector genome thereof related to a reference serotype has a polynucleotide, polypeptide or subsequence thereof that comprises or consists of a sequence at least 60% or more (e.g., 65%, 70%, 75%, 80%, 85%, 90%, 95%, 96%, 97%, 98%, 99%, 99.1%, 99.2%, 99.3%, 99.4%, 99.5%, etc.) identical to a polynucleotide, polypeptide or subsequence of an AAV1, AAV2, AAV3, AAV4, AAV5, AAV6, AAV7, AAV8, AAV9, AAV10, AAV11, AAV12, Rh10, Rh74 or AAV-2i8 particle. In particular embodiments, a rAAV particle or a vector genome thereof related to a reference serotype has a capsid or ITR sequence that comprises or consists of a sequence at least 60% or more (e.g., 65%, 70%, 75%, 80%, 85%, 90%, 95%, 96%, 97%, 98%, 99%, 99.1%, 99.2%, 99.3%, 99.4%, 99.5%, etc.) identical to a capsid or ITR sequence of an AAV1, AAV2, AAV3, AAV4, AAV5, AAV6, AAV7, AAV8, AAV9, AAV10, AAV11, AAV12, Rh10, Rh74 or AAV-2i8 serotype.

[0107] In certain embodiments, a method herein comprises use, administration or delivery of a rAAV1, rAAV2, rAAV3, rAAV4, rAAV5, rAAV6, rAAV7, rAAV8, rAAV9, rAAV10, rAAV11, rAAV12, rRh10, rRh74 or rAAV-2i8 particle.

[0108] In certain embodiments, a method herein comprises use, administration or delivery of a rAAV2 particle. In certain embodiments a rAAV2 particle comprises an AAV2 capsid. In certain embodiments a rAAV2 particle comprises one or more capsid proteins (e.g., VP1, VP2 and/or VP3) that are at least 60%, 65%, 70%, 75% or more identical, e.g., 80%, 85%, 85%, 87%, 88%, 89%, 90%, 91%, 92%, 93%, 94%, 95%, 96%, 97%, 98%, 99%, 99.1%, 99.2%, 99.3%, 99.4%, 99.5%, etc., up to 100% identical to a corresponding capsid protein of a native or wild-type AAV2 particle. In certain embodiments a rAAV2 particle comprises VP1, VP2 and VP3 capsid proteins that are at least 75% or more identical, e.g., 80%, 85%, 86%, 87%, 88%, 89%, 90%, 91%, 92%, 93%, 94%, 95%, 96%, 97%, 98%, 99%, 99.1%, 99.2%, 99.3%, 99.4%, 99.5%, etc., up to 100% identical to a corresponding capsid protein of a native or wild-type AAV2 particle. In certain embodiments, a rAAV2 particle is a variant of a native or wild-type AAV2 particle. In some aspects, one or more capsid proteins of an AAV2 variant have 1, 2, 3, 4, 5, 5-10, 10-15, 15-20 or more amino acid substitutions compared to capsid protein(s) of a native or wild-type AAV2 particle.

[0109] In certain embodiments a rAAV9 particle comprises an AAV9 capsid. In certain embodiments a rAAV9 particle comprises one or more capsid proteins (e.g., VP1, VP2 and/or VP3) that are at least 60%, 65%, 70%, 75% or more identical, e.g., 80%, 85%, 85%, 87%, 88%, 89%, 90%, 91%, 92%, 93%, 94%, 95%, 96%, 97%, 98%, 99%, 99.1%, 99.2%, 99.3%, 99.4%, 99.5%, etc., up to 100% identical to a corresponding capsid protein of a native or wild-type AAV9 particle. In certain embodiments a rAAV9 particle comprises VP1, VP2 and VP3 capsid proteins that are at least 75% or more identical, e.g., 80%, 85%, 86%, 87%, 88%, 89%, 90%, 91%, 92%, 93%, 94%, 95%, 96%, 97%, 98%, 99%, 99.1%, 99.2%, 99.3%, 99.4%, 99.5%, etc., up to 100% identical to a corresponding capsid protein of a native or wild-type AAV9 particle. In certain embodiments, a rAAV9 particle is a variant of a native or wild-type AAV9 particle. In some aspects, one or more capsid proteins of an AAV9 variant have 1, 2, 3, 4, 5, 5-10, 10-15, 15-20 or more amino acid substitutions compared to capsid protein(s) of a native or wild-type AAV9 particle.

[0110] In certain embodiments, a rAAV particle comprises one or two ITRs (e.g., a pair of ITRs) that are at least 75% or more identical, e.g., 80%, 85%, 85%, 87%, 88%, 89%, 90%, 91%, 92%, 93%, 94%, 95%, 96%, 97%, 98%, 99%, 99.1%, 99.2%, 99.3%, 99.4%, 99.5%, etc., up to 100% identical to corresponding ITRs of a native or wild-type AAV1, AAV2, AAV3, AAV4, AAV5, AAV6, AAV7, AAV8, AAV9, AAV10, AAV11, AAV12, AAV-rh74, AAV-rh10 or AAV-2i8, as long as they retain one or more desired ITR functions (e.g., ability to form a hairpin, which allows DNA replication; integration of the AAV DNA into a host cell genome; and/or packaging, if desired).

[0111] In certain embodiments, a rAAV2 particle comprises one or two ITRs (e.g., a pair of ITRs) that are at least 75% or more identical, e.g., 80%, 85%, 85%, 87%, 88%, 89%, 90%, 91%, 92%, 93%, 94%, 95%, 96%, 97%, 98%, 99%, 99.1%, 99.2%, 99.3%, 99.4%, 99.5%, etc., up to 100% identical to corresponding ITRs of a native or wild-type AAV2 particle, as long as they retain one or more desired ITR functions (e.g., ability to form a hairpin, which allows DNA replication; integration of the AAV DNA into a host cell genome; and/or packaging, if desired).

[0112] In certain embodiments, a rAAV9 particle comprises one or two ITRs (e.g., a pair of ITRs) that are at least 75% or more identical, e.g., 80%, 85%, 85%, 87%, 88%, 89%, 90%, 91%, 92%, 93%, 94%, 95%, 96%, 97%, 98%, 99%, 99.1%, 99.2%, 99.3%, 99.4%, 99.5%, etc., up to 100% identical to corresponding ITRs of a native or wild-type AAV2 particle, as long as they retain one or more desired ITR functions (e.g., ability to form a hairpin, which allows DNA replication; integration of the AAV DNA into a host cell genome; and/or packaging, if desired).

[0113] A rAAV particle can comprise an ITR having any suitable number of “GAGC” repeats. In certain embodiments an ITR of an AAV2 particle comprises 1, 2, 3, 4, 5, 6, 7, 8, 9 or 10 or more “GAGC” repeats. In certain embodiments a rAAV2 particle comprises an ITR comprising three “GAGC” repeats. In certain embodiments a rAAV2 particle comprises an ITR which has less than four “GAGC” repeats. In certain embodiments a rAAV2 particle comprises an ITR which has more than four “GAGC” repeats. In certain embodiments an ITR of a rAAV2 particle comprises a Rep binding site wherein the fourth nucleotide in the first two “GAGC” repeats is a C rather than a T.

[0114] Exemplary suitable length of DNA can be incorporated in rAAV vectors for packaging/encapsidation into a rAAV particle can about 5 kilobases (kb) or less. In particular, embodiments, length of DNA is less than about 5 kb, less than about 4.5 kb, less than about 4 kb, less than about 3.5 kb, less than about 3 kb, or less than about 2.5 kb.

[0115] rAAV vectors that include a nucleic acid sequence that directs the expression of an RNAi or polypeptide can be generated using suitable recombinant techniques known in the art (e.g., see Sambrook et al., 1989). Recombinant AAV vectors are typically packaged into transduction-competent AAV particles and propagated using an AAV viral packaging system. A transduction-competent AAV particle is capable of binding to and entering a mammalian cell and subsequently delivering a nucleic acid cargo (e.g., a heterologous gene) to the nucleus of the cell. Thus, an intact rAAV particle that is transduction-competent is configured to transduce a mammalian cell. A rAAV particle configured to transduce a mammalian cell is often not replication competent, and requires additional protein machinery to self-replicate. Thus, a rAAV particle that is configured to transduce a mammalian cell is engineered to bind and enter a mammalian cell and deliver a nucleic acid to the cell, wherein the nucleic acid for delivery is often positioned between a pair of AAV ITRs in the rAAV genome.

[0116] Suitable host cells for producing transduction-competent AAV particles include but are not limited to microorganisms, yeast cells, insect cells, and mammalian cells that can be, or have been, used as recipients of a heterologous rAAV vectors. Cells from the stable human cell line, HEK293 (readily available through, e.g., the American Type Culture Collection under Accession Number ATCC CRL1573) can be used. In certain embodiments a modified human embryonic kidney cell line (e.g., HEK293), which is transformed with adenovirus type-5 DNA fragments, and expresses the adenoviral Ela and E1b genes is used to generate recombinant AAV particles. The modified HEK293 cell line is readily transfected, and provides a particularly convenient platform in which to produce rAAV particles. Methods of generating high titer AAV particles capable of transducing mammalian cells are known in the art. For example, AAV particle can be made as set forth in Wright, 2008 and Wright, 2009.

[0117] In certain embodiments, AAV helper functions are introduced into the host cell by transfecting the host cell with an AAV helper construct either prior to, or concurrently with, the transfection of an AAV expression vector. AAV helper constructs are thus sometimes used to provide at least transient expression of AAV rep and/or cap genes to complement missing AAV functions necessary for productive AAV transduction. AAV helper constructs often lack AAV ITRs and can neither replicate nor package themselves. These constructs can be in the form of a plasmid, phage, transposon, cosmid, virus, or virion. A number of AAV helper constructs have been described, such as the commonly used plasmids pAAV/Ad and pIM29+45 which encode both Rep and Cap expression products. A number of other vectors are known which encode Rep and/or Cap expression products.

[0118] 3. Retrovirus

[0119] Viral vectors for use as a delivered agent in the methods, compositions and uses herein include a retroviral vector (see e.g., Miller (1992) Nature, 357:455-460). Retroviral vectors are well suited for delivering nucleic acid into cells because of their ability to deliver an unrearranged, single copy gene into a broad range of rodent, primate and human somatic cells. Retroviral vectors integrate into the genome of host cells. Unlike other viral vectors, they only infect dividing cells.

[0120] Retroviruses are RNA viruses such that the viral genome is RNA. When a host cell is infected with a retrovirus, the genomic RNA is reverse transcribed into a DNA intermediate, which is integrated very efficiently into the chromosomal DNA of infected cells. This integrated DNA intermediate is referred to as a provirus. Transcription of the provirus and assembly into infectious virus occurs in the presence of an appropriate helper virus or in a cell line containing appropriate sequences permitting encapsulation without coincident production of a contaminating helper virus. A helper virus is not required for the production of the recombinant retrovirus if the sequences for encapsulation are provided by co-transfection with appropriate vectors.

[0121] The retroviral genome and the proviral DNA have three genes: the gag, the pol and the env, which are flanked by two long terminal repeat (LTR) sequences. The gag gene encodes the internal structural (matrix, capsid, and nucleocapsid) proteins and the env gene encodes viral envelope glycoproteins. The pol gene encodes products that include the RNA-directed DNA polymerase reverse transcriptase that transcribes the viral RNA into double-stranded DNA, integrase that integrate the DNA produced by reverse transcriptase into host chromosomal DNA, and protease that acts to process the encoded gag and pol genes. The 5′ and 3′ LTRs serve to promote transcription and polyadenylation of the virion RNAs. The LTR contains all other cis-acting sequences necessary for viral replication.

[0122] Retroviral vectors are described by Coffin et al., Retroviruses, Cold Spring Harbor Laboratory Press (1997). Exemplary of a retrovirus is Moloney murine leukemia virus (MMLV) or the murine stem cell virus (MSCV). Retroviral vectors can be replication-competent or replication-defective. Typically, a retroviral vector is replication-defective in which the coding regions for genes necessary for additional rounds of virion replication and packaging are deleted or replaced with other genes. Consequently, the viruses are not able to continue their typical lytic pathway once an initial target cell is infected. Such retroviral vectors, and the necessary agents to produce such viruses (e.g., packaging cell line) are commercially available (see, e.g., retroviral vectors and systems available from Clontech, such as Catalog number 634401, 631503, 631501, and others, Clontech, Mountain View, Calif.).

[0123] Such retroviral vectors can be produced as delivered agents by replacing the viral genes required for replication with the nucleic acid molecule to be delivered. The resulting genome contains an LTR at each end with the desired gene or genes in between. Methods of producing retrovirus are known to one of skill in the art (see, e.g., International published PCT Application No. WO1995/026411). The retroviral vector can be produced in a packaging cell line containing a helper plasmid or plasmids. The packaging cell line provides the viral proteins required for capsid production and the virion maturation of the vector (e.g., gag, pol and env genes). Typically, at least two separate helper plasmids (separately containing the gag and pol genes; and the env gene) are used so that recombination between the vector plasmid cannot occur. For example, the retroviral vector can be transferred into a packaging cell line using standard methods of transfection, such as calcium phosphate mediated transfection. Packaging cell lines are well known to one of skill in the art, and are commercially available. An exemplary packaging cell line is GP2-293 packaging cell line (Catalog Numbers 631505, 631507, 631512, Clontech). After sufficient time for virion product, the virus is harvested. If desired, the harvested virus can be used to infect a second packaging cell line, for example, to produce a virus with varied host tropism. The end result is a replicative incompetent recombinant retrovirus that includes the nucleic acid of interest but lacks the other structural genes such that a new virus cannot be formed in the host cell.

[0124] References illustrating the use of retroviral vectors in gene therapy include: Clowes et al., (1994) J. Clin. Invest. 93:644-651; Kiem et al., (1994) Blood 83:1467-1473; Salmons and Gunzberg (1993) Human Gene Therapy 4:129-141; Grossman and Wilson (1993) Curr. Opin. in Genetics and Devel. 3:110-114; Sheridan (2011) Nature Biotechnology, 29:121; Cassani et al. (2009) Blood, 114:3546-3556.

[0125] 4. Lentivirus

[0126] Lentiviruses are complex retroviruses, which, in addition to the common retroviral genes gag, pol, and env, contain other genes with regulatory or structural function. The higher complexity enables the virus to modulate its life cycle, as in the course of latent infection. Some examples of lentivirus include the Human Immunodeficiency Viruses: HIV-1, HIV-2 and the Simian Immunodeficiency Virus: SIV. Lentiviral vectors have been generated by multiply attenuating the HIV virulence genes, for example, the genes env, vif, vpr, vpu and nef are deleted making the vector biologically safe. Lentiviral vectors are well known in the art (see, e.g., U.S. Pat. Nos. 6,013,516 and 5,994,136).

[0127] Recombinant lentiviral vectors are capable of infecting non-dividing cells and can be used for both in vivo and ex vivo gene transfer and expression of nucleic acid sequences. For example, recombinant lentivirus capable of infecting a non-dividing cell, wherein a suitable host cell is transfected with two or more vectors carrying the packaging functions, namely gag, pol and env, as well as rev and tat, is described in U.S. Pat. No. 5,994,136, incorporated herein by reference.

[0128] The lentiviral genome and the proviral DNA have the three genes found in retroviruses: gag, pol and env, which are flanked by two long terminal repeat (LTR) sequences. The gag gene encodes the internal structural (matrix, capsid and nucleocapsid) proteins; the pol gene encodes the RNA-directed DNA polymerase (reverse transcriptase), a protease and an integrase; and the env gene encodes viral envelope glycoproteins. The 5′ and 3′ LTRs serve to promote transcription and polyadenylation of the virion RNAs. The LTR contains all other cis-acting sequences necessary for viral replication. Lentiviruses have additional genes including vif, vpr, tat, rev, vpu, nef and vpx.

[0129] Adjacent to the 5′ LTR are sequences necessary for reverse transcription of the genome (the tRNA primer binding site) and for efficient encapsidation of viral RNA into particles (the Psi site). If the sequences necessary for encapsidation (or packaging of retroviral RNA into infectious virions) are missing from the viral genome, the cis defect prevents encapsidation of genomic RNA. However, the resulting mutant remains capable of directing the synthesis of all virion proteins.

[0130] 5. Other Viral Vectors

[0131] The development and utility of viral vectors for gene delivery is constantly improving and evolving. Other viral vectors such as poxvirus; e.g., vaccinia virus (Gnant et al., 1999; Gnant et al., 1999), alpha virus; e.g., sindbis virus, Semliki forest virus (Lundstrom, 1999), reovirus (Coffey et al., 1998) and influenza A virus (Neumann et al., 1999) are contemplated for use in the present disclosure and may be selected according to the requisite properties of the target system.

[0132] 6. Chimeric Viral Vectors

[0133] Chimeric or hybrid viral vectors are being developed for use in therapeutic gene delivery and are contemplated for use in the present disclosure. Chimeric poxviral/retroviral vectors (Holzer et al., 1999), adenoviral/retroviral vectors (Feng et al., 1997; Bilbao et al., 1997; Caplen et al., 2000) and adenoviral/adeno-associated viral vectors (Fisher et al., 1996; U.S. Pat. No. 5,871,982) have been described. These “chimeric” viral gene transfer systems can exploit the favorable features of two or more parent viral species. For example, Wilson et al., provide a chimeric vector construct which comprises a portion of an adenovirus, AAV 5′ and 3′ ITR sequences and a selected transgene, described below (U.S. Pat. No. 5,871,983, specifically incorporate herein by reference).

[0134] B. Nanoparticles

[0135] 1. Lipid-Based Nanoparticles

[0136] In some embodiments, a lipid-based nanoparticle is a liposome, an exosome, a lipid preparation, or another lipid-based nanoparticle, such as a lipid-based vesicle (e.g., a DOTAP:cholesterol vesicle). Lipid-based nanoparticles may be positively charged, negatively charged, or neutral.

[0137] b. Liposomes

[0138] A “liposome” is a generic term encompassing a variety of single and multilamellar lipid vehicles formed by the generation of enclosed lipid bilayers or aggregates. Liposomes may be characterized as having vesicular structures with a bilayer membrane, generally comprising a phospholipid, and an inner medium that generally comprises an aqueous composition. Liposomes provided herein include unilamellar liposomes, multilamellar liposomes, and multivesicular liposomes. Liposomes provided herein may be positively charged, negatively charged, or neutrally charged. In certain embodiments, the liposomes are neutral in charge.

[0139] A multilamellar liposome has multiple lipid layers separated by aqueous medium. Such liposomes form spontaneously when lipids comprising phospholipids are suspended in an excess of aqueous solution. The lipid components undergo self-rearrangement before the formation of closed structures and entrap water and dissolved solutes between the lipid bilayers. Lipophilic molecules or molecules with lipophilic regions may also dissolve in or associate with the lipid bilayer.

[0140] In specific aspects, a polypeptide, a nucleic acid, or a small molecule drug may be, for example, encapsulated in the aqueous interior of a liposome, interspersed within the lipid bilayer of a liposome, attached to a liposome via a linking molecule that is associated with both the liposome and the polypeptide/nucleic acid, entrapped in a liposome, complexed with a liposome, or the like.

[0141] A liposome used according to the present embodiments can be made by different methods, as would be known to one of ordinary skill in the art. For example, a phospholipid, such as for example the neutral phospholipid dioleoylphosphatidylcholine (DOPC), is dissolved in tert-butanol. The lipid(s) is then mixed with a polypeptide, nucleic acid, and/or other component(s). Tween 20 is added to the lipid mixture such that Tween 20 is about 5% of the composition's weight. Excess tert-butanol is added to this mixture such that the volume of tert-butanol is at least 95%. The mixture is vortexed, frozen in a dry ice/acetone bath and lyophilized overnight. The lyophilized preparation is stored at −20° C. and can be used up to three months. When required the lyophilized liposomes are reconstituted in 0.9% saline.

[0142] Alternatively, a liposome can be prepared by mixing lipids in a solvent in a container, e.g., a glass, pear-shaped flask. The container should have a volume ten-times greater than the volume of the expected suspension of liposomes. Using a rotary evaporator, the solvent is removed at approximately 40° C. under negative pressure. The solvent normally is removed within about 5 min to 2 h, depending on the desired volume of the liposomes. The composition can be dried further in a desiccator under vacuum. The dried lipids generally are discarded after about 1 week because of a tendency to deteriorate with time.

[0143] Dried lipids can be hydrated at approximately 25-50 mM phospholipid in sterile, pyrogen-free water by shaking until all the lipid film is resuspended. The aqueous liposomes can be then separated into aliquots, each placed in a vial, lyophilized and sealed under vacuum.

[0144] The dried lipids or lyophilized liposomes prepared as described above may be dehydrated and reconstituted in a solution of a protein or peptide and diluted to an appropriate concentration with a suitable solvent, e.g., DPBS. The mixture is then vigorously shaken in a vortex mixer. Unencapsulated additional materials, such as agents including but not limited to hormones, drugs, nucleic acid constructs and the like, are removed by centrifugation at 29,000×g and the liposomal pellets washed. The washed liposomes are resuspended at an appropriate total phospholipid concentration, e.g., about 50-200 mM. The amount of additional material or active agent encapsulated can be determined in accordance with standard methods. After determination of the amount of additional material or active agent encapsulated in the liposome preparation, the liposomes may be diluted to appropriate concentrations and stored at 4° C. until use. A pharmaceutical composition comprising the liposomes will usually include a sterile, pharmaceutically acceptable carrier or diluent, such as water or saline solution.

[0145] Additional liposomes which may be useful with the present embodiments include cationic liposomes, for example, as described in WO02/100435A1, U.S. Pat. No. 5,962,016, U.S. Application 2004/0208921, WO03/015757A1, WO04029213A2, U.S. Pat. Nos. 5,030,453, and 6,680,068, all of which are hereby incorporated by reference in their entirety without disclaimer.

[0146] In preparing such liposomes, any protocol described herein, or as would be known to one of ordinary skill in the art may be used. Additional non-limiting examples of preparing liposomes are described in U.S. Pat. Nos. 4,728,578, 4,728,575, 4,737,323, 4,533,254, 4,162,282, 4,310,505, and 4,921,706; International Applications PCT/US85/01161 and PCT/US89/05040, each incorporated herein by reference.

[0147] In certain embodiments, the lipid-based nanoparticle is a neutral liposome (e.g., a DOPC liposome). “Neutral liposomes” or “non-charged liposomes”, as used herein, are defined as liposomes having one or more lipid components that yield an essentially-neutral, net charge (substantially non-charged). By “essentially neutral” or “essentially non-charged”, it is meant that few, if any, lipid components within a given population (e.g., a population of liposomes) include a charge that is not canceled by an opposite charge of another component (i.e., fewer than 10% of components include a non-canceled charge, more preferably fewer than 5%, and most preferably fewer than 1%). In certain embodiments, neutral liposomes may include mostly lipids and/or phospholipids that are themselves neutral under physiological conditions (i.e., at about pH 7).

[0148] Liposomes and/or lipid-based nanoparticles of the present embodiments may comprise a phospholipid. In certain embodiments, a single kind of phospholipid may be used in the creation of liposomes (e.g., a neutral phospholipid, such as DOPC, may be used to generate neutral liposomes). In other embodiments, more than one kind of phospholipid may be used to create liposomes. Phospholipids may be from natural or synthetic sources. Phospholipids include, for example, phosphatidylcholines, phosphatidylglycerols, and phosphatidylethanolamines; because phosphatidylethanolamines and phosphatidyl cholines are non-charged under physiological conditions (i.e., at about pH 7), these compounds may be particularly useful for generating neutral liposomes. In certain embodiments, the phospholipid DOPC is used to produce non-charged liposomes. In certain embodiments, a lipid that is not a phospholipid (e.g., a cholesterol) may be used

[0149] Phospholipids include glycerophospholipids and certain sphingolipids. Phospholipids include, but are not limited to, dioleoylphosphatidylycholine (“DOPC”), egg phosphatidylcholine (“EPC”), dilauryloylphosphatidylcholine (“DLPC”), dimyristoylphosphatidylcholine (“DMPC”), dipalmitoylphosphatidylcholine (“DPPC”), distearoylphosphatidylcholine (“DSPC”), 1-myristoyl-2-palmitoyl phosphatidylcholine (“MPPC”), 1-palmitoyl-2-myristoyl phosphatidylcholine (“PMPC”), 1-palmitoyl-2-stearoyl phosphatidylcholine (“PSPC”), 1-stearoyl-2-palmitoyl phosphatidylcholine (“SPPC”), dilauryloylphosphatidylglycerol (“DLPG”), dimyristoylphosphatidylglycerol (“DMPG”), dipalmitoylphosphatidylglycerol (“DPPG”), distearoylphosphatidylglycerol (“DSPG”), distearoyl sphingomyelin (“DSSP”), distearoylphophatidylethanolamine (“DSPE”), dioleoylphosphatidylglycerol (“DOPG”), dimyristoyl phosphatidic acid (“DMPA”), dipalmitoyl phosphatidic acid (“DPPA”), dimyristoyl phosphatidylethanolamine (“DMPE”), dipalmitoyl phosphatidylethanolamine (“DPPE”), dimyristoyl phosphatidylserine (“DMPS”), dipalmitoyl phosphatidylserine (“DPPS”), brain phosphatidylserine (“BPS”), brain sphingomyelin (“BSP”), dipalmitoyl sphingomyelin (“DPSP”), dimyristyl phosphatidylcholine (“DMPC”), 1,2-distearoyl-sn-glycero-3-phosphocholine (“DAPC”), 1,2-diarachidoyl-sn-glycero-3-phosphocholine (“DBPC”), 1,2-dieicosenoyl-sn-glycero-3-phosphocholine (“DEPC”), dioleoylphosphatidylethanolamine (“DOPE”), palmitoyloeoyl phosphatidylcholine (“POPC”), palmitoyloeoyl phosphatidylethanolamine (“POPE”), lysophosphatidylcholine, lysophosphatidylethanolamine, and dilinoleoylphosphatidylcholine.

[0150] c. Exosomes

[0151] “Extracellular vesicles” and “EVs” are cell-derived and cell-secreted microvesicles which, as a class, include exosomes, exosome-like vesicles, ectosomes (which result from budding of vesicles directly from the plasma membrane), microparticles, microvesicles, shedding microvesicles (SMVs), nanoparticles and even (large) apoptotic blebs or bodies (resulting from cell death) or membrane particles.

[0152] The terms “microvesicle” and “exosomes,” as used herein, refer to a membranous particle having a diameter (or largest dimension where the particles is not spheroid) of between about 10 nm to about 5000 nm, more typically between 30 nm and 1000 nm, and most typically between about 50 nm and 750 nm, wherein at least part of the membrane of the exosomes is directly obtained from a cell. Most commonly, exosomes will have a size (average diameter) that is up to 5% of the size of the donor cell. Therefore, especially contemplated exosomes include those that are shed from a cell.

[0153] Exosomes may be detected in or isolated from any suitable sample type, such as, for example, body fluids. As used herein, the term “isolated” refers to separation out of its natural environment and is meant to include at least partial purification and may include substantial purification. As used herein, the term “sample” refers to any sample suitable for the methods provided by the present invention. The sample may be any sample that includes exosomes suitable for detection or isolation. Sources of samples include blood, bone marrow, pleural fluid, peritoneal fluid, cerebrospinal fluid, urine, saliva, amniotic fluid, malignant ascites, broncho-alveolar lavage fluid, synovial fluid, breast milk, sweat, tears, joint fluid, and bronchial washes. In one aspect, the sample is a blood sample, including, for example, whole blood or any fraction or component thereof. A blood sample suitable for use with the present invention may be extracted from any source known that includes blood cells or components thereof, such as venous, arterial, peripheral, tissue, cord, and the like. For example, a sample may be obtained and processed using well-known and routine clinical methods (e.g., procedures for drawing and processing whole blood). In one aspect, an exemplary sample may be peripheral blood drawn from a subject with cancer.

[0154] Exosomes may also be isolated from tissue samples, such as surgical samples, biopsy samples, tissues, feces, and cultured cells. When isolating exosomes from tissue sources it may be necessary to homogenize the tissue in order to obtain a single cell suspension followed by lysis of the cells to release the exosomes. When isolating exosomes from tissue samples it is important to select homogenization and lysis procedures that do not result in disruption of the exosomes. Exosomes contemplated herein are preferably isolated from body fluid in a physiologically acceptable solution, for example, buffered saline, growth medium, various aqueous medium, etc.

[0155] Exosomes may be isolated from freshly collected samples or from samples that have been stored frozen or refrigerated. In some embodiments, exosomes may be isolated from cell culture medium. Although not necessary, higher purity exosomes may be obtained if fluid samples are clarified before precipitation with a volume-excluding polymer, to remove any debris from the sample. Methods of clarification include centrifugation, ultracentrifugation, filtration, or ultrafiltration. Most typically, exosomes can be isolated by numerous methods well-known in the art. One preferred method is differential centrifugation from body fluids or cell culture supernatants. Exemplary methods for isolation of exosomes are described in (Losche et al., 2004; Mesri and Altieri, 1998; Morel et al., 2004). Alternatively, exosomes may also be isolated via flow cytometry as described in (Combes et al., 1997).

[0156] One accepted protocol for isolation of exosomes includes ultracentrifugation, often in combination with sucrose density gradients or sucrose cushions to float the relatively low-density exosomes. Isolation of exosomes by sequential differential centrifugations is complicated by the possibility of overlapping size distributions with other microvesicles or macromolecular complexes. Furthermore, centrifugation may provide insufficient means to separate vesicles based on their sizes. However, sequential centrifugations, when combined with sucrose gradient ultracentrifugation, can provide high enrichment of exosomes.

[0157] Isolation of exosomes based on size, using alternatives to the ultracentrifugation routes, is another option. Successful purification of exosomes using ultrafiltration procedures that are less time consuming than ultracentrifugation, and do not require use of special equipment have been reported. Similarly, a commercial kit is available (EXOMIR™, Bioo Scientific) which allows removal of cells, platelets, and cellular debris on one microfilter and capturing of vesicles bigger than 30 nm on a second microfilter using positive pressure to drive the fluid. However, for this process, the exosomes are not recovered, their RNA content is directly extracted from the material caught on the second microfilter, which can then be used for PCR analysis. HPLC-based protocols could potentially allow one to obtain highly pure exosomes, though these processes require dedicated equipment and are difficult to scale up. A significant problem is that both blood and cell culture media contain large numbers of nanoparticles (some non-vesicular) in the same size range as exosomes. For example, some miRNAs may be contained within extracellular protein complexes rather than exosomes; however, treatment with protease (e.g., proteinase K) can be performed to eliminate any possible contamination with “extraexosomal” protein.

[0158] In another embodiment, exosomes may be captured by techniques commonly used to enrich a sample for exosomes, such as those involving immunospecific interactions (e.g., immunomagnetic capture). Immunomagnetic capture, also known as immunomagnetic cell separation, typically involves attaching antibodies directed to proteins found on a particular cell type to small paramagnetic beads. When the antibody-coated beads are mixed with a sample, such as blood, they attach to and surround the particular cell. The sample is then placed in a strong magnetic field, causing the beads to pellet to one side. After removing the blood, captured cells are retained with the beads. Many variations of this general method are well-known in the art and suitable for use to isolate exosomes. In one example, the exosomes may be attached to magnetic beads (e.g., aldehyde/sulphate beads) and then an antibody is added to the mixture to recognize an epitope on the surface of the exosomes that are attached to the beads.

[0159] As will be appreciated by one of skill in the art, prior or subsequent to loading with cargo, exosomes may be further altered by inclusion of a targeting moiety to enhance the utility thereof as a vehicle for delivery of cargo. In this regard, exosomes may be engineered to incorporate an entity that specifically targets a particular cell to tissue type. This target-specific entity, e.g., peptide having affinity for a receptor or ligand on the target cell or tissue, may be integrated within the exosomal membrane, for example, by fusion to an exosomal membrane marker using methods well-established in the art.

[0160] 2. Nonlipid Nanoparticles

[0161] Spherical Nucleic Acid (SNA™) constructs and other nanoparticles (particularly gold nanoparticles) are also contemplated as a means to deliver chimeric minigenes to intended target cells. Due to their dense loading, a majority of cargo (e.g., DNA) remains bound to the constructs inside cells, conferring nucleic acid stability and resistance to enzymatic degradation. For all cell types studied (e.g., neurons, tumor cell lines, etc.) the constructs demonstrate a transfection efficiency of 99% with no need for carriers or transfection agents. The unique target binding affinity and specificity of the constructs allow exquisite specificity for matched target sequences (i.e., limited off-target effects). The constructs significantly outperform leading conventional transfection reagents (Lipofectamine 2000 and Cytofectin). The constructs can enter a variety of cultured cells, primary cells, and tissues with no apparent toxicity. The constructs elicit minimal changes in global gene expression as measured by whole-genome microarray studies and cytokine-specific protein assays. Any number of single or combinatorial agents (e.g., proteins, peptides, small molecules) can be used to tailor the surface of the constructs. See, e.g., Jensen et al., Sci. Transl. Med. 5, 209ra152 (2013).

[0162] Self-assembling nanoparticles with nucleic acid cargo may be constructed with polyethyleneimine (PEI) that is PEGylated with an Arg-Gly-Asp (RGD) peptide ligand attached at the distal end of the polyethylene glycol (PEG). Nanoplexes may be prepared by mixing equal volumes of aqueous solutions of cationic polymer and nucleic acid to give a net molar excess of ionizable nitrogen (polymer) to phosphate (nucleic acid) over the range of 2 to 6. The electrostatic interactions between cationic polymers and nucleic acid resulted in the formation of polyplexes with average particle size distribution of about 100 nm, hence referred to here as nanoplexes (see, e.g., Bartlett et al., PNAS, 104:39, 2007).

### V. PHARMACEUTICAL COMPOSITIONS

[0163] As used herein the term “pharmaceutically acceptable” and “physiologically acceptable” mean a biologically acceptable composition, formulation, liquid or solid, or mixture thereof, which is suitable for one or more routes of administration, in vivo delivery or contact. A “pharmaceutically acceptable” or “physiologically acceptable” composition is a material that is not biologically or otherwise undesirable, e.g., the material may be administered to a subject without causing substantial undesirable biological effects. Such composition, “pharmaceutically acceptable” and “physiologically acceptable” formulations and compositions can be sterile. Such pharmaceutical formulations and compositions may be used, for example in administering a viral particle or nanoparticle to a subject.

[0164] Such formulations and compositions include solvents (aqueous or non-aqueous), solutions (aqueous or non-aqueous), emulsions (e.g., oil-in-water or water-in-oil), suspensions, syrups, elixirs, dispersion and suspension media, coatings, isotonic and absorption promoting or delaying agents, compatible with pharmaceutical administration or in vivo contact or delivery. Aqueous and non-aqueous solvents, solutions and suspensions may include suspending agents and thickening agents. Supplementary active compounds (e.g., preservatives, antibacterial, antiviral and antifungal agents) can also be incorporated into the formulations and compositions.

[0165] Pharmaceutical compositions typically contain a pharmaceutically acceptable excipient. Such excipients include any pharmaceutical agent that does not itself induce the production of antibodies harmful to the individual receiving the composition, and which may be administered without undue toxicity. Pharmaceutically acceptable excipients include, but are not limited to, sorbitol, Tween80, and liquids such as water, saline, glycerol and ethanol. Pharmaceutically acceptable salts can be included therein, for example, mineral acid salts such as hydrochlorides, hydrobromides, phosphates, sulfates, and the like; and the salts of organic acids such as acetates, propionates, malonates, benzoates, and the like. Additionally, auxiliary substances, such as surfactants, wetting or emulsifying agents, pH buffering substances, and the like, may be present in such vehicles.

[0166] Pharmaceutical compositions can be formulated to be compatible with a particular route of administration or delivery, as set forth herein or known to one of skill in the art. Thus, pharmaceutical compositions include carriers, diluents, or excipients suitable for administration or delivery by various routes.

[0167] Pharmaceutical forms suitable for injection or infusion of viral particles or nanoparticles can include sterile aqueous solutions or dispersions which are adapted for the extemporaneous preparation of sterile injectable or infusible solutions or dispersions, optionally encapsulated in liposomes. In all cases, the ultimate form should be a sterile fluid and stable under the conditions of manufacture, use and storage. The liquid carrier or vehicle can be a solvent or liquid dispersion medium comprising, for example, water, ethanol, a polyol (for example, glycerol, propylene glycol, liquid polyethylene glycols, and the like), vegetable oils, nontoxic glyceryl esters, and suitable mixtures thereof. The proper fluidity can be maintained, for example, by the formation of liposomes, by the maintenance of the required particle size in the case of dispersions or by the use of surfactants. Isotonic agents, for example, sugars, buffers or salts (e.g., sodium chloride) can be included. Prolonged absorption of injectable compositions can be brought about by the use in the compositions of agents delaying absorption, for example, aluminum monostearate and gelatin.

[0168] Solutions or suspensions of viral particles or nanoparticles can optionally include one or more of the following components: a sterile diluent such as water for injection, saline solution, such as phosphate buffered saline (PBS), artificial CSF, a surfactants, fixed oils, a polyol (for example, glycerol, propylene glycol, and liquid polyethylene glycol, and the like), glycerin, or other synthetic solvents; antibacterial and antifungal agents such as parabens, chlorobutanol, phenol, ascorbic acid, and the like; antioxidants such as ascorbic acid or sodium bisulfite; chelating agents such as ethylenediaminetetraacetic acid; buffers such as acetates, citrates or phosphates and agents for the adjustment of tonicity such as sodium chloride or dextrose.

[0169] Pharmaceutical formulations, compositions and delivery systems appropriate for the compositions, methods and uses of the invention are known in the art (see, e.g., Remington: The Science and Practice of Pharmacy (2003) 20^{th} ed., Mack Publishing Co., Easton, Pa.; Remington's Pharmaceutical Sciences (1990) 18^{th} ed., Mack Publishing Co., Easton, Pa.; The Merck Index (1996) 12^{th} ed., Merck Publishing Group, Whitehouse, N.J.; Pharmaceutical Principles of Solid Dosage Forms (1993), Technonic Publishing Co., Inc., Lancaster, Pa.; Ansel and Stoklosa, Pharmaceutical Calculations (2001) 11^{th} ed., Lippincott Williams & Wilkins, Baltimore, Md.; and Poznansky et al., Drug Delivery Systems (1980), R. L. Juliano, ed., Oxford, N.Y., pp. 253-315).

[0170] Viral particles, nanoparticles, and their compositions may be formulated in dosage unit form for ease of administration and uniformity of dosage. Dosage unit form as used herein refers to physically discrete units suited as unitary dosages for an individual to be treated; each unit containing a predetermined quantity of active compound calculated to produce the desired therapeutic effect in association with the required pharmaceutical carrier. The dosage unit forms are dependent upon the number of viral particles or nanoparticles believed necessary to produce the desired effect(s). The amount necessary can be formulated in a single dose, or can be formulated in multiple dosage units. The dose may be adjusted to a suitable viral particle or nanoparticle concentration, optionally combined with an anti-inflammatory agent, and packaged for use.

[0171] In one embodiment, pharmaceutical compositions will include sufficient genetic material to provide a therapeutically effective amount, i.e., an amount sufficient to reduce or ameliorate symptoms or an adverse effect of a disease state in question or an amount sufficient to confer the desired benefit.

[0172] A “unit dosage form” as used herein refers to physically discrete units suited as unitary dosages for the subject to be treated; each unit containing a predetermined quantity optionally in association with a pharmaceutical carrier (excipient, diluent, vehicle or filling agent) which, when administered in one or more doses, is calculated to produce a desired effect (e.g., prophylactic or therapeutic effect). Unit dosage forms may be within, for example, ampules and vials, which may include a liquid composition, or a composition in a freeze-dried or lyophilized state; a sterile liquid carrier, for example, can be added prior to administration or delivery in vivo. Individual unit dosage forms can be included in multi-dose kits or containers. Thus, for example, viral particles, nanoparticles, and pharmaceutical compositions thereof can be packaged in single or multiple unit dosage form for ease of administration and uniformity of dosage.

[0173] Formulations containing viral particles or nanoparticles typically contain an effective amount, the effective amount being readily determined by one skilled in the art. The viral particles or nanoparticles may typically range from about 1% to about 95% (w/w) of the composition, or even higher if suitable. The quantity to be administered depends upon factors such as the age, weight and physical condition of the mammal or the human subject considered for treatment. Effective dosages can be established by one of ordinary skill in the art through routine trials establishing dose response curves.

### VI. DEFINITIONS

[0174] The terms “polynucleotide,” “nucleic acid” and “transgene” are used interchangeably herein to refer to all forms of nucleic acid, oligonucleotides, including deoxyribonucleic acid (DNA) and ribonucleic acid (RNA) and polymers thereof. Polynucleotides include genomic DNA, cDNA and antisense DNA, and spliced or unspliced mRNA, rRNA, tRNA and inhibitory DNA or RNA (RNAi, e.g., small or short hairpin (sh)RNA, microRNA (miRNA), small or short interfering (si)RNA, trans-splicing RNA, or antisense RNA). Polynucleotides can include naturally occurring, synthetic, and intentionally modified or altered polynucleotides (e.g., variant nucleic acid). Polynucleotides can be single stranded, double stranded, or triplex, linear or circular, and can be of any suitable length. In discussing polynucleotides, a sequence or structure of a particular polynucleotide may be described herein according to the convention of providing the sequence in the 5′ to 3′ direction.

[0175] A nucleic acid encoding a polypeptide often comprises an open reading frame that encodes the polypeptide. Unless otherwise indicated, a particular nucleic acid sequence also includes degenerate codon substitutions.

[0176] Nucleic acids can include one or more expression control or regulatory elements operably linked to the open reading frame, where the one or more regulatory elements are configured to direct the transcription and translation of the polypeptide encoded by the open reading frame in a mammalian cell. Non-limiting examples of expression control/regulatory elements include transcription initiation sequences (e.g., promoters, enhancers, a TATA box, and the like), translation initiation sequences, mRNA stability sequences, poly A sequences, secretory sequences, and the like. Expression control/regulatory elements can be obtained from the genome of any suitable organism.

[0177] A “promoter” refers to a nucleotide sequence, usually upstream (5′) of a coding sequence, which directs and/or controls the expression of the coding sequence by providing the recognition for RNA polymerase and other factors required for proper transcription. “Promoter” includes a minimal promoter that is a short DNA sequence comprised of a TATA-box and optionally other sequences that serve to specify the site of transcription initiation, to which regulatory elements are added for control of expression.

[0178] An “enhancer” is a DNA sequence that can stimulate transcription activity and may be an innate element of the promoter or a heterologous element that enhances the level or tissue specificity of expression. It is capable of operating in either orientation (5′->3′ or 3′->5′), and may be capable of functioning even when positioned either upstream or downstream of the promoter.

[0179] Promoters and/or enhancers may be derived in their entirety from a native gene, or be composed of different elements derived from different elements found in nature, or even be comprised of synthetic DNA segments. A promoter or enhancer may comprise DNA sequences that are involved in the binding of protein factors that modulate/control effectiveness of transcription initiation in response to stimuli, physiological or developmental conditions.

[0180] Non-limiting examples include SV40 early promoter, mouse mammary tumor virus LTR promoter; adenovirus major late promoter (Ad MLP); a herpes simplex virus (HSV) promoter, a cytomegalovirus (CMV) promoter such as the CMV immediate early promoter region (CMVIE), a rous sarcoma virus (RSV) promoter, pol II promoters, pol III promoters, synthetic promoters, hybrid promoters, and the like. In addition, sequences derived from non-viral genes, such as the murine metallothionein gene, will also find use herein. Exemplary constitutive promoters include the promoters for the following genes which encode certain constitutive or “housekeeping” functions: hypoxanthine phosphoribosyl transferase (HPRT), dihydrofolate reductase (DHFR), adenosine deaminase, phosphoglycerol kinase (PGK), pyruvate kinase, phosphoglycerol mutase, the actin promoter, and other constitutive promoters known to those of skill in the art. In addition, many viral promoters function constitutively in eukaryotic cells. These include: the early and late promoters of SV40; the long terminal repeats (LTRs) of Moloney Leukemia Virus and other retroviruses; and the thymidine kinase promoter of Herpes Simplex Virus, among many others. Accordingly, any of the above-referenced constitutive promoters can be used to control transcription of a heterologous gene insert.

[0181] A “transgene” is used herein to conveniently refer to a nucleic acid sequence/polynucleotide that is intended or has been introduced into a cell or organism. Transgenes include any nucleic acid, such as a gene that encodes an inhibitory RNA or polypeptide or protein, and are generally heterologous with respect to naturally occurring AAV genomic sequences.

[0182] The term “transduce” refers to introduction of a nucleic acid sequence into a cell or host organism by way of a vector (e.g., a viral particle). Introduction of a transgene into a cell by a viral particle is can therefore be referred to as “transduction” of the cell. The transgene may or may not be integrated into genomic nucleic acid of a transduced cell. If an introduced transgene becomes integrated into the nucleic acid (genomic DNA) of the recipient cell or organism it can be stably maintained in that cell or organism and further passed on to or inherited by progeny cells or organisms of the recipient cell or organism. Finally, the introduced transgene may exist in the recipient cell or host organism extra chromosomally, or only transiently. A “transduced cell” is therefore a cell into which the transgene has been introduced by way of transduction. Thus, a “transduced” cell is a cell into which, or a progeny thereof in which a transgene has been introduced. A transduced cell can be propagated, transgene transcribed and the encoded inhibitory RNA or protein expressed. For gene therapy uses and methods, a transduced cell can be in a mammal.

[0183] A nucleic acid/transgene is “operably linked” when it is placed into a functional relationship with another nucleic acid sequence. A nucleic acid/transgene encoding and RNAi or a polypeptide, or a nucleic acid directing expression of a polypeptide may include an inducible promoter, or a tissue-specific promoter for controlling transcription of the encoded polypeptide. A nucleic acid operably linked to an expression control element can also be referred to as an expression cassette.

[0184] As used herein, the terms “modify” or “variant” and grammatical variations thereof, mean that a nucleic acid, polypeptide or subsequence thereof deviates from a reference sequence. Modified and variant sequences may therefore have substantially the same, greater or less expression, activity or function than a reference sequence, but at least retain partial activity or function of the reference sequence. A particular type of variant is a mutant protein, which refers to a protein encoded by a gene having a mutation, e.g., a missense or nonsense mutation.

[0185] A “nucleic acid” or “polynucleotide” variant refers to a modified sequence which has been genetically altered compared to wild-type. The sequence may be genetically modified without altering the encoded protein sequence. Alternatively, the sequence may be genetically modified to encode a variant protein. A nucleic acid or polynucleotide variant can also refer to a combination sequence which has been codon modified to encode a protein that still retains at least partial sequence identity to a reference sequence, such as wild-type protein sequence, and also has been codon-modified to encode a variant protein. For example, some codons of such a nucleic acid variant will be changed without altering the amino acids of a protein encoded thereby, and some codons of the nucleic acid variant will be changed which in turn changes the amino acids of a protein encoded thereby.

[0186] The terms “protein” and “polypeptide” are used interchangeably herein. The “polypeptides” encoded by a “nucleic acid” or “polynucleotide” or “transgene” disclosed herein include partial or full-length native sequences, as with naturally occurring wild-type and functional polymorphic proteins, functional subsequences (fragments) thereof, and sequence variants thereof, so long as the polypeptide retains some degree of function or activity. Accordingly, in methods and uses of the invention, such polypeptides encoded by nucleic acid sequences are not required to be identical to the endogenous protein that is defective, or whose activity, function, or expression is insufficient, deficient or absent in a treated mammal.

[0187] An example of an amino acid modification is a conservative amino acid substitution or a deletion. In particular embodiments, a modified or variant sequence retains at least part of a function or activity of the unmodified sequence (e.g., wild-type sequence).

[0188] Another example of an amino acid modification is a targeting peptide introduced into a capsid protein of a viral particle. Peptides have been identified that target recombinant viral vectors or nanoparticles to various organs and tissues.

[0189] A “variant” of a molecule is a sequence that is substantially similar to the sequence of the native molecule. For nucleotide sequences, variants include those sequences that, because of the degeneracy of the genetic code, encode the identical amino acid sequence of the native protein. Naturally occurring allelic variants such as these can be identified with the use of molecular biology techniques, as, for example, with polymerase chain reaction (PCR) and hybridization techniques. Variant nucleotide sequences also include synthetically derived nucleotide sequences, such as those generated, for example, by using site-directed mutagenesis, which encode the native protein, as well as those that encode a polypeptide having amino acid substitutions. Generally, nucleotide sequence variants of the invention will have at least 40%, 50%, 60%, to 70%, e.g., 71%, 72%, 73%, 74%, 75%, 76%, 77%, 78%, to 79%, generally at least 80%, e.g., 81%-84%, at least 85%, e.g., 86%, 87%, 88%, 89%, 90%, 91%, 92%, 93%, 94%, 95%, 96%, 97%, to 98%, sequence identity to the native (endogenous) nucleotide sequence. In certain embodiments, the variant is biologically functional (i.e., retains 5%, 10%, 15%, 20%, 25%, 30%, 35%, 40%, 45%, 50%, 55%, 60%, 65%, 70%, 75%, 80%, 85%, 90%, 95%, 99% or 100% of activity or function of wild-type).

[0190] “Conservative variations” of a particular nucleic acid sequence refers to those nucleic acid sequences that encode identical or essentially identical amino acid sequences. Because of the degeneracy of the genetic code, a large number of functionally identical nucleic acids encode any given polypeptide. For instance, the codons CGT, CGC, CGA, CGG, AGA and AGG all encode the amino acid arginine. Thus, at every position where an arginine is specified by a codon, the codon can be altered to any of the corresponding codons described without altering the encoded protein. Such nucleic acid variations are “silent variations,” which are one species of “conservatively modified variations.” Every nucleic acid sequence described herein that encodes a polypeptide also describes every possible silent variation, except where otherwise noted. One of skill in the art will recognize that each codon in a nucleic acid (except ATG, which is ordinarily the only codon for methionine) can be modified to yield a functionally identical molecule by standard techniques. Accordingly, each “silent variation” of a nucleic acid that encodes a polypeptide is implicit in each described sequence.

[0191] The term “substantial identity” of polynucleotide sequences means that a polynucleotide comprises a sequence that has at least 70%, 71%, 72%, 73%, 74%, 75%, 76%, 77%, 78%, or 79%, or at least 80%, 81%, 82%, 83%, 84%, 85%, 86%, 87%, 88%, or 89%, or at least 90%, 91%, 92%, 93%, or 94%, or even at least 95%, 96%, 97%, 98%, or 99% sequence identity, compared to a reference sequence using one of the alignment programs described using standard parameters. One of skill in the art will recognize that these values can be appropriately adjusted to determine corresponding identity of proteins encoded by two nucleotide sequences by taking into account codon degeneracy, amino acid similarity, reading frame positioning, and the like. Substantial identity of amino acid sequences for these purposes normally means sequence identity of at least 70%, at least 80%, 90%, or even at least 95%.

[0192] The term “substantial identity” in the context of a polypeptide indicates that a polypeptide comprises a sequence with at least 70%, 71%, 72%, 73%, 74%, 75%, 76%, 77%, 78%, or 79%, or 80%, 81%, 82%, 83%, 84%, 85%, 86%, 87%, 88%, or 89%, or at least 90%, 91%, 92%, 93%, or 94%, or even, 95%, 96%, 97%, 98% or 99%, sequence identity to the reference sequence over a specified comparison window. An indication that two polypeptide sequences are identical is that one polypeptide is immunologically reactive with antibodies raised against the second polypeptide. Thus, a polypeptide is identical to a second polypeptide, for example, where the two peptides differ only by a conservative substitution.

[0193] The terms “treat” and “treatment” refer to both therapeutic treatment and prophylactic or preventative measures, wherein the object is to prevent, inhibit, reduce, or decrease an undesired physiological change or disorder, such as the development, progression or worsening of the disorder. For purposes of this invention, beneficial or desired clinical results include, but are not limited to, alleviation of symptoms, diminishment of extent of disease, stabilizing a (i.e., not worsening or progressing) symptom or adverse effect of disease, delay or slowing of disease progression, amelioration or palliation of the disease state, and remission (whether partial or total), whether detectable or undetectable. “Treatment” can also mean prolonging survival as compared to expected survival if not receiving treatment. Those in need of treatment include those already with the condition or disorder as well as those predisposed (e.g., as determined by a genetic assay).

### VII. EXAMPLES

[0194] The following examples are included to demonstrate preferred embodiments of the invention. It should be appreciated by those of skill in the art that the techniques disclosed in the examples which follow represent techniques discovered by the inventor to function well in the practice of the invention, and thus can be considered to constitute preferred modes for its practice. However, those of skill in the art should, in light of the present disclosure, appreciate that many changes can be made in the specific embodiments which are disclosed and still obtain a like or similar result without departing from the spirit and scope of the invention.

### Example 1 Materials and Methods

[0195] General cell culture. HEK293T cells (ATCC CRL-3216) were cultured using DMEM (ThermoFisher Scientific #10569044) supplemented with 10% fetal bovine serum (ThermoFisher Scientific #10437028) and 1× penicillin-streptomycin (ThermoFisher Scientific #15140122) in T-75 flasks (Corning 353136). Cells were passaged every two days at 90-95% confluency. Cells were washed with PBS (ThermoFisher Scientific #10010023), detached using Tryple Express (ThermoFisher Scientific #12605010), and spun down in centrifuge at 200×g for 3 min. The supplemented DMEM was used to resuspend cells and a quarter of the volume was used to culture into a new flask. For transfection, 35k-45k cells were plated into each well of Poly-D-Lysine coated 48-well plates (Corning 356509). Cells were incubated at 37° C. for 16 h before transfection.

[0196] Transfection of HEK293T cells. In a PCR tube, 750 ng of base editor plasmid and 250 ng of sgRNA plasmid were mixed and diluted up to 12.5 μL using Opti-MEM (ThermoFisher Scientific #31985062). In a separate tube, 1.5 μL of lipofectamine 2000 (ThermoFisher Scientific #11668027) and 11.0 μL of Opti-MEM were mixed, and then transferred into the tube containing the plasmid mix. After a 15 min incubation at room temperature, the plasmid-lipofectamine complex was added on top of a 48-well culture with cells dropwise. Cells were incubated at 37° C. for 60-72 h without changing media.

[0197] Base editing analysis using EditR. At 3-days post-transfection, cell media was aspirated, washed with 100 μL PBS per well, and incubated with lysis buffer (10 mM Tris-HCl, 0.05% SDS, 25 μg/mL proteinase K, pH 8.0) at 37° C. for 1 h. Cell lysates were collected in PCR tubes and incubated at 80° C. for 30 min to inactivate proteinase K. Regions of interest of genomic DNA were amplified using Phanta Max (Vazyme #P515) and 29-34 PCR cycles. Amplified fragments were gel extracted and sent for Sanger sequencing using Genewiz. Sanger chromatograms were analyzed using EditR (available at moriaritylab.shinyapps.io/editr_v10) to quantify the percentage of C-to-T conversion at the target region.

[0198] Creating stable cell line disease model. The HEK293T stable cell line was constructed by cloning a 200-bp fragment of disease-associated gene upstream of an EF1α promoter to drive the expression of the puromycin resistance gene in a lentiviral vector. The single-base mutation of a disease-associated gene was inserted by PCR and In-Fusion cloning (Takara). The lentiviral vector was transfected into HEK293T cells in a 24-well plate (Olympus) at 80%-90% confluency. For each well, 288 ng of the plasmid containing the vector of interest, 72 ng of pMD2.G and 144 ng of psPAX2 (gifts from Dr. Isaac Hilton's Lab at Rice University) were transfected using 1.0 μl of Lipofectamine 2000 and 25 μl Opti-MEM I reduced serum medium (Life Technologies). Viral supernatant was harvested 48 h post-transfection, filtered with a 0.45-μm PVDF filter (Millipore), then serially diluted to add into a 24-well plate cultured with 5×10⁴ HEK293T cells per well. After 24 h, cells transduced with lentivirus were split into new plate wells supplemented with 3 μg·ml⁻¹ puromycin. 72 h after the puromycin selection, cells were harvested from the well with the fewest surviving colonies to ensure single-copy integration and were then further cultured for expansion.

[0199] High-throughput sequencing (HTS) library preparation. The HTS library was prepared using two rounds of PCR. For the first round, a 200-bp DNA fragment of the target region was amplified in a total volume of 25 μL mixed with 12.5 μL of the Q5 High-Fidelity 2× Master Mix, 1 μL of the extracted genomic DNA, and a pair of primers (see Supplementary Materials). Successful amplification of individual samples was checked using 1% agarose gel. For the second round, combinations of different Illumina indexes were attached at each 5′ and 3′ end of the first PCR products using the same total PCR volume. The PCR products were combined and column-purified using a QIAquick PCR Purification Kit (Qiagen) and further gel extracted to remove non-specific amplifications. The final mixture of the library was quantified using Qubit dsDNA HS Assay Kit (Life Technologies) and prepared for loading into a 150-cycle MiSeq Reagent Kit v3 (Illumina) according to the manufacturer's protocol.

### Example 2 Enhancing A3G Activity

[0200] Previous studies show that the expression level of base editors in mammalian cells correlates with the enhanced base editing activity (Koblan et al., 2018). The wild-type human A3G (hA3G) DNA fragment was extracted from Addgene plasmid #113415 (hCMV_hA3G-BE3). The rAPOBEC1 deaminase portion of pCMV_BE4MAX (addgene #112093) was then replaced with the extracted A3G DNA fragment to construct hA3G(wild-type)-BE4MAX using the In-fusion method (Fisher #NC0465914). Additionally, the hA3G gene fragment was codon optimized and hA3G(opt.)-BE4MAX was constructed to even further improve the expression level.

[0201] Five mutations were incorporated into A3G (P200A+N236A+P247K+Q318K+Q322K) to improve the catalytic activity of A3G deaminase (Rathore et al., 2013; Maiti et al., 2008; Chen et al., 2008). These combined mutations in A3G improve the overall activity of C-to-T conversions without critically influencing the native ‘CC’ preferential motif. A gene fragment containing the five mutations was ordered from Genscript and cloned using the In-fusion method to construct A3G (opt.+P200A+N236A+P247K+Q318K+Q322K) BE4MAX. Additionally, the A3G deaminase was truncated to include only the C-terminal half (198-384) of the protein and all of the five mutations, which were in the C-terminal half. General PCR methods were used to clone the truncated A3G (198-384, opt.+P200A+N236A+P247K+Q318K+Q322K) BE4MAX.

### Example 3 Recovering ‘CC’ Selectivity

[0202] Activity enhancement generally results in relaxation of the ‘CC’ selectivity, meaning the C on the left, or the non-target C, is also likely to be converted to T. As such, the stringency of selectivity was increased by reducing the DNA binding energy around the target C region. Mutations of N244G and Y315F were individually introduced to the A3G constructs using PCR.

[0203] To test the C-to-T editing abilities of the engineered A3G base editors, various genomic sites that harbor the ‘CC’ dinucleotide sequence motif within the 5 nt activity window in HEK293T cells were selected. For these experiments, 35,000 HEK293T cells per well were cultured in 48-well plate (Corning #356509) under 250 μL of DMEM supplemented with 10% FBS (ThermoFisher #10437028) and 1× penicillin-streptomycin (ThermoFisher #15140122). The next day, HEK293T cells were transfected with 750 ng of base editor and 250 ng of target-specific guide RNA per well using lipofectamine 2000 (ThermoFisher #11668027). Cells were harvested after 3 days of transfection, genomic DNA extracted, and the region of the genomic site being tested amplified for Sanger sequencing in Genewiz. The chromatogram result from each Sanger sequence was inputted into EditR (Kluesner et al., 2018) to quantify the C-to-T conversions for both Cs on the left and right of the target sequence.

[0204] The HEK3 site (GGC₃C₄C₅AGC₉TGAGCACGTGA) was selected as a genomic site for testing. As shown in FIG. 1, A3G 2.1 and A3G 4.4, both of which contain no amino acid mutation in the A3G domain, displayed high selectivity for editing C5. All the other variants tested showed relaxed editing on both C4 and C5.

[0205] The ACCA motif in the HEK4 #a2 site (AGGAC₅C₆AGATTC₁₂TTACCCCT) was selected as a genomic site for testing. As shown in FIG. 2, C₆ was selectively edited over C₅ by all A3G variants tested. Note that CCA is a pseudo-native motif of A3G.

[0206] The TCCA motif in the EMX1 #2 site (GATC₄C₅ATGCCTTGTCACCTC) was selected as a genomic site for testing. As shown in FIG. 3, A3G 2.1, A3G 3.1, A3G 5.1, and A3G 5.4 showed selective editing of C₅ over C₄. All other variants displayed relaxation of selectivity, editing C₄ around or above half of the C₅ editing rate. This trend is a little different than that observed in the HEK4 #a2 site, which contained an ACCA motif. T at the −2 position from the target C in the TCCA motif in EMX1 #2 may contribute to this relaxation due to its similar structure as C.

[0207] The TCCA motif in the RNF #2 site (ATGTC₅TGTAAAGTC₁₄C₁₅ATGGT) was selected as a genomic site for testing. This motif is the same as the previous EMX1 #2 site; however, this motif is outside the canonical window (positions from 4 to 9 while counting PAM as positions 21 and 23). As shown in FIG. 4, significant selectivity was observed for both A3G 4.4 and A3G 5.13, while high editing efficiency comparable to BE4MAX was observed for A3G 5.13. This suggests that A3G 5.13 might be more potent in editing single target C located outside the conventional activity window of BE4MAX.

[0208] The GCCT motif in the BCS1L #1 site (CTAGGC₆C₇TTGGTACTTTACT), the ACCT motif in the PPP1R12C #a2 site (GGAAC₅C₆TGAAGGAGGCGGCA), and the TCCT motif in EMX1 #a3 site (GAGTC₅C₆TGTGTGGGAGGATG) were selected as genomic sites for testing. As shown in FIG. 5, A3G 4.4 displayed high selectivity between the two consecutive Cs across all three sites. In the BCS1L #1 site, which contains G at the −2 position from the target C, A3G 5.13 showed good editing efficiency and selectivity. A3G 5.13 selectively edited the second C over the first C in both BCS1L #1 and PPP1R12C #a2 sites, but not in EMX1 #a3, due to there being a T at the −2 position, which is structurally similar to C.

[0209] The ACCT motif in the EMX1 #a10 site (GTGTGAC₇C₈TGTTC₁₃C₁₄C₁₅ACATC) was selected as a genomic site for testing. As shown in FIG. 6, A3G 2.1 and 4.4 showed generally low activity. All other variants, except for A3G 7.5, displayed selective editing for C₈ over C₇. Variants 5.1, 5.3, 5.4, and 5.13 have greater activity than BE4MAX.

[0210] The GCCG motif in the FANCF #a3 site (TGGGGC₆C₇GAC₁₀GAGACAAAGG) was selected as a genomic site for testing. As shown in FIG. 7, A3G 5.13 selectively edited C₇ over C₆ with the editing efficiency of C₇ being comparable to that of BE4MAX. While A3G 4.4 showed high selectivity, the on-target editing rate was low. This trend is similar to that shown for the BCS1L #1 site that contained G at −2 position from the target C.

[0211] The GCCG motif in the EMX1 #a18 site (AGGC₄C₅GGTGGC₁₁AGAGGGAGC) was selected as a genomic site for testing. As shown in FIG. 8, both A3G 2.1 and A3G 4.4 shows low editing efficiency. However, A3G 5.1, A3G 5.4, and A3G 5.13 showed good selectivity while maintaining the on-target Cs editing above half of that of BE4MAX.

[0212] The GCCG and ACCA motifs in the FANCF #2 site (CATGC₅C₆GAC₉C₁₀AAAGCGCCGA) were selected as genomic sites for testing. As shown in FIG. 9, for all variants except for A3G 2.1, both the selectivity and editing efficiency were superior in the ‘ACCA’ than ‘GCG’ motif in FANCF #2 site.

[0213] The ACCG motif in the HEK4 #a1 site (AAAAC₅C₆GAGGGGTAAGAATC) was selected as a genomic site for testing. As shown in FIG. 10, A3G 4.4 and 5.13 showed greater editing efficiency on C₆ than that of BE4MAX, while A3G 4.4 showed better selectivity on C₆ over C₅ than A3G 5.13.

[0214] The TCCG motif in the EMX1 genomic site in HEK293T cells, which harbors the ‘CC’ dinucleotide sequence motif within the 5 nt activity window (EMX1: GAGTC₅C₆GAGC₁₀AGAAGAAGAA) was selected as one of the genomic sites for testing. As shown in FIG. 11, A3G 4.4 showed good selectivity on this site. Starting from A3G 5.1, a series of mutations were made to improve general catalytic efficiency of A3G base editor (Table 1). As shown in FIG. 12, A3G 5.10 and 5.11 displayed the highest editing activity. A3G 5.13 and 5.14, derived by adding Y315F mutation in A3G 5.3 and 5.4, respectively, displayed selectivity recovery while mildly compromising its general editing efficiency. As shown in FIG. 13, A3G version 6 base editor variants (6.11˜6.21) derived from A3G 5.10 showed that fine tuning could further enable selectivity enhancement by compromising its editing efficiency. A3G 8.1, which included the high-fidelity HypaCas9 variant from A3G 5.13, showed comparable editing rate on both C₄ and C₅ as that of A3G 5.13.

[0215] A3G natively prefers full motif of C₋₂C₋₁C₀A₊₁. Given that A3G prefers a C at −2 position, it was sought to determine whether the present variants can still selectively edit the target C₀ when the C₋₁ is changed to other nucleotides, including T, A, or G. To this end, the ACACA motif in the HEK2 site (GAAC₄AC₆AAAGCATAGACTGC) was selected as one of the genomic sites for testing. The HEK2 site represents a motif where two Cs are separated by one non-C nucleotide. As shown in FIG. 14, selective editing on C₆ over C₄ was observed from all variants except for A3G 5.3. As such, for sites harboring C₋₂ TC₀, C₋₂ AC₀, and C₋₂ GC₀, the present variants could preferably edit C₀ over C₋₂.

[0216] The TCGCCG motif in the MSSK1-M-c site (CGTC₄GC₆C₇GATCTTCACAGGG) was selected as one of the genomic sites for testing. In the MSSK1-M-c site, C₆ is more prone to be edited due to presence of C₄. As shown in FIG. 15, relaxed editing on C₆ was observed across all variants. However, editing rate on C₄ stayed low except for that edited by A3G 5.12, and BE4MAX displayed selective editing on all C₄, C₆, and C₇.

[0217] The TCCCT motif in the FANCF site (GGAATC₆C₇C₈TTC₁₁TGCAGCACC) was selected as one of the genomic sites for testing. As shown in FIG. 16, all variants including A3G 2.1 showed relaxed activity, although in general C₆ editing rates are lower than those of C₇ and C₈. Editing efficiencies between C₇ and C₈ are similar across all A3G variants. Importantly, T is structurally similar to C, indicating A3G could recognize it as close to its ideal motif. Ts in FANCF site might contribute to this trend of relaxation.

[0218] EMX1 and FANCF #a3 sites, which contain dinucleotide Cs (C5 and C6 of EMX1 #1 and C6 and C7 of FANCF #a3) within the conanical BE4max activity window, were selected to screen base editing efficiency and specificity of engineered A3G-BE variants in HEK293T cells. As shown in FIG. 17, A3G-BE6.11 induced higher selectivity than A3G-BE5.10 by moderately reducing editing of the bystander Cs, while A3G-BE6.16 and 6.17 displayed drastically reduced editing efficiencies of the cognate Cs, even below those of A3G-BE4.4. All A3G-BE6.18, 6.19, 6.20, and 6.21 showed improved editing ratios of the cognate to bystander Cs compared with A3G-BE6.11, their cognate C editing efficiencies did not outperform A3G-BE4.4. A3G-BE 5.13 and 5.14 cognate Cs editing efficiencies outperformed A3G-BE4.4, while bystander Cs editing efficiencies were appreciably low.

[0219] Three genetic variants caused by C-to-T (or G-to-A) substitution in which the wild-type sequences lie within the preferential 5′-CC-3′ motif of A3G-BEs were selected, including cystic fibrosis (model 1, NM_000492.3(CFTR):c.3293G>A), hypertonic myopathy (model 2, NM_000256.3(MYBPC3):c.3005G>A), and transthyretin amyloidosis (model 3, NM_000371.3(TTR):c.199G>A). Three reported human pathogenic SNPs caused by T>C (or A>G) mutations, which can be preferentially targeted by A3G-BEs were selected, including hereditary pyropoikilocytosis (correction 1, NM_003126.4(SPTA1):c.620T>C), cystic fibrosis (correction 2, NM_000492.3(CFTR):c.4004T>C), and holocarboxylase synthetase deficiency (correction 3, NM_000411.8(HLCS):c.710T>C). As shown in FIG. 18, HTS analysis was performed to quantify perfectly modified alleles for disease modeling and correction after treatment of BE4max, A3G-BE4.4, A3G-BE5.13, and A3G-BE5.14.

[0220] Although the engineered A3G BEs could target the second ‘C’ in the ‘CC’ motif that two consecutive ‘C’s exist, the activity windows are broad, e.g., expanding to 12 nucleotides. To further improve and narrow the activity window, starting from A3G-BE5.13, a series of engineered enzymes was generated to have a narrower window for precision-gene editing. To do so, A3G-BEs were engineered to incorporate more rigid linkers between the deaminase and nCas9, e.g., peptides with repetitive proline-alanine (PA) amino acid sequences (‘PA,’ or ‘PAPA,’ or ‘PAPAPA’), to provide conformational restriction. The repetitive ‘PA’ linkers (3, 7, 9 and 15 amino acids) were tested to directly compare the effects of both the length and rigidity of the linkers on the base editing outcomes. The activity window under the most stringent conditions was examined by testing endogenous EMX1 polyC #1 site that harbors multiple consecutive ‘C’s in HEK293T (FIG. 19). Base editing efficiencies were evaluated to correlate different linkers and their activity window sizes. When PA linker 3aa (PAP, named CBE-A3G5.20) was used, the editing efficiency at C₅ was comparable with the original GSSG linker 32aa, while bystander editing at other positions was significantly reduced.

[0221] Next, different mutations were introduced to the CBE-A3G5.20 protein, including W285Y, W285F, R320A, R320E, and R326E. The new mutant with R320E mutation (named CBE-A3G5.28) maintained high editing activity at the C₅ position, while diminished the activity at other positions toward the 5′ end of the protospacer (FIG. 20).

[0222] All of the methods disclosed and claimed herein can be made and executed without undue experimentation in light of the present disclosure. While the compositions and methods of this invention have been described in terms of preferred embodiments, it will be apparent to those of skill in the art that variations may be applied to the methods and in the steps or in the sequence of steps of the method described herein without departing from the concept, spirit, and scope of the invention. More specifically, it will be apparent that certain agents which are both chemically and physiologically related may be substituted for the agents described herein while the same or similar results would be achieved. All such similar substitutes and modifications apparent to those skilled in the art are deemed to be within the spirit, scope, and concept of the invention as defined by the appended claims.

### REFERENCES

[0223] The following references, to the extent that they provide exemplary procedural or other details supplementary to those set forth herein, are specifically incorporated herein by reference.
[0224] U.S. Pat. No. 9,068,179
[0225] U.S. Pat. No. 9,840,699
[0226] U.S. Pat. No. 10,113,163
[0227] U.S. Pat. No. 10,167,457
[0228] U.S. Patent Application Publication 2018/0170984
[0229] U.S. Patent Application Publication 2018/0312828
[0230] PCT Patent Application Publication WO2018/165629
[0231] Anzalone et al., Search-and-replace genome editing without double-strand breaks or donor DNA. Nature, (2019).
[0232] Beale et al., Comparison of the differential context-dependence of DNA deamination by APOBEC enzymes: correlation with mutation spectra in vivo. Journal of molecular biology 337, 585-596 (2004).
[0233] Carpenter, M. A. et al. Methylcytosine and normal cytosine deamination by the foreign DNA restriction enzyme APOBEC3A. The Journal of Biological Chemistry 287, 34801-34808 (2012).
[0234] Chen, K.-M. et al. Structure of the DNA deaminase domain of the HIV-1 restriction factor APOBEC3G. Nature 452, 116-119 (2008).
[0235] Cheng et al., Expanding CT base editing toolkit with diversified cytidine deaminases. Nature communications 10, 3612 (2019).
[0236] Clement et al., CRISPResso2 provides accurate and rapid genome editing sequence analysis. Nature biotechnology 37, 224-226 (2019).
[0237] Conticello, The AID/APOBEC family of nucleic acid mutators. Genome biology 9, 229 (2008).
[0238] Gaudelli, N. M. et al. Programmable base editing of A T to G C in genomic DNA without DNA cleavage. Nature 551, 464-471 (2017).
[0239] Gehrke, J. M. et al. An APOBEC3A-Cas9 base editor with minimized bystander and off-target activities. Nature biotechnology 36, 977-982 (2018).
[0240] Grunewald, J. et al. Transcriptome-wide off-target RNA editing induced by CRISPR-guided DNA base editors. Nature 569, 433-437 (2019).
[0241] Harris et al., DNA deamination mediates innate immunity to retroviral infection. Cell 113, 803-809 (2003).
[0242] Holden et al., Crystal structure of the anti-viral APOBEC3G catalytic domain and functional implications. Nature 456, 121-124 (2008).
[0243] Huang, T. P. et al. Circularly permuted and PAM-modified Cas9 variants broaden the targeting scope of base editors. Nature Biotechnology (2019).
[0244] Hunt, in Single Nucleotide Polymorphisms. (Humana Press, Totowa, N.J., 2009), vol. 578, pp. 23-39.
[0245] Jiang, W. et al. BE-PLUS: a new base editing tool with broadened editing window and enhanced fidelity. Cell Research 28, 855-861 (2018).
[0246] Jin, S. et al. Cytosine, but not adenine, base editors induce genome-wide off-target mutations in rice. Science 364, 292-295 (2019).
[0247] Kim, Y. B. et al. Increasing the genome-targeting scope and precision of base editing with engineered Cas9-cytidine deaminase fusions. Nature biotechnology 35, 371-376 (2017).
[0248] Koblan, L. W. et al. Improving cytidine and adenine base editors by expression optimization and ancestral reconstruction. Nature Biotechnology 36, 843-846 (2018).
[0249] Komor, A. C., Badran, A. H. & Liu, D. R. CRISPR-based technologies for the manipulation of eukaryotic genomes. Cell 168, 20-36 (2017).
[0250] Komor, A. C. et al. Improved base excision repair inhibition and bacteriophage Mu Gam protein yields C: G-to-T: A base editors with higher efficiency and product purity. Science Advances 3, eaao4774 (2017).
[0251] Komor, A. C., Kim, Y. B., Packer, M. S., Zuris, J. A. & Liu, D. R. Programmable editing of a target base in genomic DNA without double-stranded DNA cleavage. Nature 533, 420-424 (2016).
[0252] Landrum, M. J. et al. ClinVar: public archive of interpretations of clinically relevant variants. Nucleic Acids Research 44, D862-D868 (2016).
[0253] Langlois et al., Mutational comparison of the single-domained APOBEC3C and double-domained APOBEC3F/G anti-retroviral cytidine deaminases provides insight into their DNA target site specificities. Nucleic acids research 33, 1913-1923 (2005).
[0254] Lee, H. K. et al. Targeting fidelity of adenine and cytosine base editors in mouse embryos. Nature Communications 9, 4804 (2018).
[0255] Liu, Z., Chen, S., Shan, H., Chen, M., Song, Y., Lai, L., & Li, Z. (2019). Highly precise base editing with CC context-specificity using engineered human APOBEC3G-nCas9 fusions. BioRxiv. doi:10.1101/658351
[0256] Maiti, A. et al. Crystal structure of the catalytic domain of HIV-1 restriction factor APOBEC3G in complex with ssDNA. Nature Communications 9, 2460 (2018).
[0257] Marx, A., Galilee, M., & Alian, A. (2015). Zinc enhancement of cytidine deaminase activity highlights a potential allosteric role of loop-3 in regulating APOBEC3 enzymes. Scientific Reports, 5(1).
[0258] Morse et al., Dimerization regulates both deaminase-dependent and deaminase-independent HIV-1 restriction by APOBEC3G. Nature communications 8, 597 (2017).
[0259] Nishida, K. et al. Targeted nucleotide editing using hybrid prokaryotic and vertebrate adaptive immune systems. Science 353, aaf8729 (2016).
[0260] Nowarski et al., APOBEC3G inhibits HIV-1 RNA elongation by inactivating the viral trans-activation response element. Journal of molecular biology 426, 2840-2853 (2014).
[0261] Ran et al., Genome engineering using the CRISPR-Cas9 system. Nature protocols 8, 2281-2308 (2013).
[0262] Rathore, A. et al. The local dinucleotide preference of APOBEC3G can be altered from 5′-CC to 5′-TC by a single amino acid substitution. Journal of Molecular Biology 425, 10.1016/j.jmb.2013.1007.1040 (2013).
[0263] Rees, H. A. et al. Improving the DNA specificity and applicability of base editing through protein engineering and protein delivery. Nature Communications 8, 15790 (2017).
[0264] Rees, H. A. & Liu, D. R. Base editing: precision chemistry on the genome and transcriptome of living cells. Nature Reviews Genetics 19, 770-788 (2018).
[0265] Ryu et al., Adenine base editing in mouse embryos and an adult mouse model of Duchenne muscular dystrophy. Nature biotechnology 36, 536 (2018).
[0266] Tan et al., Engineering of high-precision base editors for site-456 specific single nucleotide replacement. Nature communications 10, 439 (2019).
[0267] Tanenbaum et al., A protein-tagging system for signal amplification in gene expression and fluorescence imaging. Cell 159, 635-646 (2014).
[0268] Wang, X. et al. Efficient base editing in methylated regions with a human APOBEC3A-Cas9 fusion. Nature Biotechnology 36, 946-949 (2018).
[0269] Wang et al., Comparison of cytosine base editors and development of the BEable-GPS database for targeting pathogenic SNVs. Genome biology 20, 1-7 (2019).
[0270] Yu et al., Single-strand specificity of APOBEC3G accounts for minus-strand deamination of the HIV genome. Nature structural & molecular biology 11, 435-442 (2004).
[0271] Zhou et al., Off-target RNA mutation induced by DNA base editing and its elimination by mutagenesis. Nature 571, 275-278 (2019).
[0272] Ziegler et al., Insights into DNA substrate selection by APOBEC3G from structural, biochemical, and functional studies. PLoS One 13, e0195048 (2018).
[0273] Zong, Y. et al. Efficient C-to-T base editing in plants using a fusion of nCas9 and human APOBEC3A. Nature biotechnology 36, 950-953 (2018).
[0274] Zuo, E. et al. Cytosine base editor generates substantial off-target single-nucleotide variants in mouse embryos. Science 364, 289-292 (2019).

The application's sequence listing, which the Patent Office published only in electronic form, follows.

SEQUENCE LISTING (54 sequences)

SEQ ID NO: 1 - protein, 1865 aa, Artificial sequence
  Synthetic polypeptide
MKPHFRNTVERMYRDTFSYNFYNRPILSRRNTVWLCYEVKTKGPSRPPLDAKIFRGQVYSELKYHPEMRFFHWFSKWRKLHRDQEYEVTWYISWSPCTKCTRDMATFLAEDPKVTLTIFVARLYYFWDPDYQEALRSLCQKRDGPRATMKIMNYDEFQHCWSKFVYSQRELFEPWNNLPKYYILLHIMLGEILRHSMDPPTFTFNFNNEPWVRGRHETYLCYEVERMHNDTWVLLNQRRGFLCNQAPHKHGFLEGRHAELCFLDVIPFWKLDLDQDYRVTCFTSWSPCFSCAQEMAKFISKNKHVSLCIFTARIYDDQGRCQEGLRTLAEAGAKISIMTYSEFKHCWDTFVDHQGCPFQPWDGLDEHSQDLSGRLRAILQNQENSGSETPGTSESATPESDKKYSIGLAIGTNSVGWAVITDEYKVPSKKFKVLGNTDRHSIKKNLIGALLFDSGETAEATRLKRTARRRYTRRKNRICYLQEIFSNEMAKVDDSFFHRLEESFLVEEDKKHERHPIFGNIVDEVAYHEKYPTIYHLRKKLVDSTDKADLRLIYLALAHMIKFRGHFLIEGDLNPDNSDVDKLFIQLVQTYNQLFEENPINASGVDAKAILSARLSKSRRLENLIAQLPGEKKNGLFGNLIALSLGLTPNFKSNFDLAEDAKLQLSKDTYDDDLDNLLAQIGDQYADLFLAAKNLSDAILLSDILRVNTEITKAPLSASMIKRYDEHHQDLTLLKALVRQQLPEKYKEIFFDQSKNGYAGYIDGGASQEEFYKFIKPILEKMDGTEELLVKLNREDLLRKQRTFDNGSIPHQIHLGELHAILRRQEDFYPFLKDNREKIEKILTFRIPYYVGPLARGNSRFAWMTRKSEETITPWNFEEVVDKGASAQSFIERMTNFDKNLPNEKVLPKHSLLYEYFTVYNELTKVKYVTEGMRKPAFLSGEQKKAIVDLLFKTNRKVTVKQLKEDYFKKIECFDSVEISGVEDRFNASLGTYHDLLKIIKDKDFLDNEENEDILEDIVLTLTLFEDREMIEERLKTYAHLFDDKVMKQLKRRRYTGWGRLSRKLINGIRDKQSGKTILDFLKSDGFANRNFMQLIHDDSLTFKEDIQKAQVSGQGDSLHEHIANLAGSPAIKKGILQTVKVVDELVKVMGRHKPENIVIEMARENQTTQKGQKNSRERMKRIEEGIKELGSQILKEHPVENTQLQNEKLYLYYLQNGRDMYVDQELDINRLSDYDVDHIVPQSFLKDDSIDNKVLTRSDKNRGKSDNVPSEEVVKKMKNYWRQLLNAKLITQRKFDNLTKAERGGLSELDKAGFIKRQLVETRQITKHVAQILDSRMNTKYDENDKLIREVKVITLKSKLVSDFRKDFQFYKVREINNYHHAHDAYLNAVVGTALIKKYPKLESEFVYGDYKVYDVRKMIAKSEQEIGKATAKYFFYSNIMNFFKTEITLANGEIRKRPLIETNGETGEIVWDKGRDFATVRKVLSMPQVNIVKKTEVQTGGFSKESILPKRNSDKLIARKKDWDPKKYGGFDSPTVAYSVLVVAKVEKGKSKKLKSVKELLGITIMERSSFEKNPIDFLEAKGYKEVKKDLIIKLPKYSLFELENGRKRMLASAGELQKGNELALPSKYVNFLYLASHYEKLKGSPEDNEQKQLFVEQHKHYLDEIIEQISEFSKRVILADANLDKVLSAYNKHRDKPIREQAENIIHLFTLTNLGAPAAFKYFDTTIDRKRYTSTKEVLDATLIHQSITGLYETRIDLSQLGGDSGGSTNLSDIIEKETGKQLVIQESILMLPEEVEEVIGNKPESDILVHTAYDESTDENVMLLTSDAPEYKPWALVIQDSNGENKIKMLSGGSPKKKRKV

SEQ ID NO: 2 - protein, 1980 aa, Artificial sequence
  Synthetic polypeptide
MKPHFRNTVERMYRDTFSYNFYNRPILSRRNTVWLCYEVKTKGPSRPPLDAKIFRGQVYSELKYHPEMRFFHWFSKWRKLHRDQEYEVTWYISWSPCTKCTRDMATFLAEDPKVTLTIFVARLYYFWDPDYQEALRSLCQKRDGPRATMKIMNYDEFQHCWSKFVYSQRELFEPWNNLPKYYILLHIMLGEILRHSMDPPTFTFNFNNEPWVRGRHETYLCYEVERMHNDTWVLLNQRRGFLCNQAPHKHGFLEGRHAELCFLDVIPFWKLDLDQDYRVTCFTSWSPCFSCAQEMAKFISKNKHVSLCIFTARIYDDQGRCQEGLRTLAEAGAKISIMTYSEFKHCWDTFVDHQGCPFQPWDGLDEHSQDLSGRLRAILQNQENSGGSSGGSSGSETPGTSESATPESSGGSSGGSDKKYSIGLAIGTNSVGWAVITDEYKVPSKKFKVLGNTDRHSIKKNLIGALLFDSGETAEATRLKRTARRRYTRRKNRICYLQEIFSNEMAKVDDSFFHRLEESFLVEEDKKHERHPIFGNIVDEVAYHEKYPTIYHLRKKLVDSTDKADLRLIYLALAHMIKFRGHFLIEGDLNPDNSDVDKLFIQLVQTYNQLFEENPINASGVDAKAILSARLSKSRRLENLIAQLPGEKKNGLFGNLIALSLGLTPNFKSNFDLAEDAKLQLSKDTYDDDLDNLLAQIGDQYADLFLAAKNLSDAILLSDILRVNTEITKAPLSASMIKRYDEHHQDLTLLKALVRQQLPEKYKEIFFDQSKNGYAGYIDGGASQEEFYKFIKPILEKMDGTEELLVKLNREDLLRKQRTFDNGSIPHQIHLGELHAILRRQEDFYPFLKDNREKIEKILTFRIPYYVGPLARGNSRFAWMTRKSEETITPWNFEEVVDKGASAQSFIERMTNFDKNLPNEKVLPKHSLLYEYFTVYNELTKVKYVTEGMRKPAFLSGEQKKAIVDLLFKTNRKVTVKQLKEDYFKKIECFDSVEISGVEDRFNASLGTYHDLLKIIKDKDFLDNEENEDILEDIVLTLTLFEDREMIEERLKTYAHLFDDKVMKQLKRRRYTGWGRLSRKLINGIRDKQSGKTILDFLKSDGFANRNFMQLIHDDSLTFKEDIQKAQVSGQGDSLHEHIANLAGSPAIKKGILQTVKVVDELVKVMGRHKPENIVIEMARENQTTQKGQKNSRERMKRIEEGIKELGSQILKEHPVENTQLQNEKLYLYYLQNGRDMYVDQELDINRLSDYDVDHIVPQSFLKDDSIDNKVLTRSDKNRGKSDNVPSEEVVKKMKNYWRQLLNAKLITQRKFDNLTKAERGGLSELDKAGFIKRQLVETRQITKHVAQILDSRMNTKYDENDKLIREVKVITLKSKLVSDFRKDFQFYKVREINNYHHAHDAYLNAVVGTALIKKYPKLESEFVYGDYKVYDVRKMIAKSEQEIGKATAKYFFYSNIMNFFKTEITLANGEIRKRPLIETNGETGEIVWDKGRDFATVRKVLSMPQVNIVKKTEVQTGGFSKESILPKRNSDKLIARKKDWDPKKYGGFDSPTVAYSVLVVAKVEKGKSKKLKSVKELLGITIMERSSFEKNPIDFLEAKGYKEVKKDLIIKLPKYSLFELENGRKRMLASAGELQKGNELALPSKYVNFLYLASHYEKLKGSPEDNEQKQLFVEQHKHYLDEIIEQISEFSKRVILADANLDKVLSAYNKHRDKPIREQAENIIHLFTLTNLGAPAAFKYFDTTIDRKRYTSTKEVLDATLIHQSITGLYETRIDLSQLGGDSGGSGGSGGSTNLSDIIEKETGKQLVIQESILMLPEEVEEVIGNKPESDILVHTAYDESTDENVMLLTSDAPEYKPWALVIQDSNGENKIKMLSGGSGGSGGSTNLSDIIEKETGKQLVIQESILMLPEEVEEVIGNKPESDILVHTAYDESTDENVMLLTSDAPEYKPWALVIQDSNGENKIKMLSGGSPKKKRKV

SEQ ID NO: 3 - protein, 2008 aa, Artificial sequence
  Synthetic polypeptide
MKRTADGSEFESPKKKRKVKPHFRNTVERMYRDTFSYNFYNRPILSRRNTVWLCYEVKTKGPSRPPLDAKIFRGQVYSELKYHPEMRFFHWFSKWRKLHRDQEYEVTWYISWSPCTKCTRDMATFLAEDPKVTLTIFVARLYYFWDPDYQEALRSLCQKRDGPRATMKIMNYDEFQHCWSKFVYSQRELFEPWNNLPKYYILLHIMLGEILRHSMDPPTFTFNFNNEPWVRGRHETYLCYEVERMHNDTWVLLNQRRGFLCNQAPHKHGFLEGRHAELCFLDVIPFWKLDLDQDYRVTCFTSWSPCFSCAQEMAKFISKNKHVSLCIFTARIYDDQGRCQEGLRTLAEAGAKISIMTYSEFKHCWDTFVDHQGCPFQPWDGLDEHSQDLSGRLRAILQNQENSGGSSGGSSGSETPGTSESATPESSGGSSGGSDKKYSIGLAIGTNSVGWAVITDEYKVPSKKFKVLGNTDRHSIKKNLIGALLFDSGETAEATRLKRTARRRYTRRKNRICYLQEIFSNEMAKVDDSFFHRLEESFLVEEDKKHERHPIFGNIVDEVAYHEKYPTIYHLRKKLVDSTDKADLRLIYLALAHMIKFRGHFLIEGDLNPDNSDVDKLFIQLVQTYNQLFEENPINASGVDAKAILSARLSKSRRLENLIAQLPGEKKNGLFGNLIALSLGLTPNFKSNFDLAEDAKLQLSKDTYDDDLDNLLAQIGDQYADLFLAAKNLSDAILLSDILRVNTEITKAPLSASMIKRYDEHHQDLTLLKALVRQQLPEKYKEIFFDQSKNGYAGYIDGGASQEEFYKFIKPILEKMDGTEELLVKLNREDLLRKQRTFDNGSIPHQIHLGELHAILRRQEDFYPFLKDNREKIEKILTFRIPYYVGPLARGNSRFAWMTRKSEETITPWNFEEVVDKGASAQSFIERMTNFDKNLPNEKVLPKHSLLYEYFTVYNELTKVKYVTEGMRKPAFLSGEQKKAIVDLLFKTNRKVTVKQLKEDYFKKIECFDSVEISGVEDRFNASLGTYHDLLKIIKDKDFLDNEENEDILEDIVLTLTLFEDREMIEERLKTYAHLFDDKVMKQLKRRRYTGWGRLSRKLINGIRDKQSGKTILDFLKSDGFANRNFMQLIHDDSLTFKEDIQKAQVSGQGDSLHEHIANLAGSPAIKKGILQTVKVVDELVKVMGRHKPENIVIEMARENQTTQKGQKNSRERMKRIEEGIKELGSQILKEHPVENTQLQNEKLYLYYLQNGRDMYVDQELDINRLSDYDVDHIVPQSFLKDDSIDNKVLTRSDKNRGKSDNVPSEEVVKKMKNYWRQLLNAKLITQRKFDNLTKAERGGLSELDKAGFIKRQLVETRQITKHVAQILDSRMNTKYDENDKLIREVKVITLKSKLVSDFRKDFQFYKVREINNYHHAHDAYLNAVVGTALIKKYPKLESEFVYGDYKVYDVRKMIAKSEQEIGKATAKYFFYSNIMNFFKTEITLANGEIRKRPLIETNGETGEIVWDKGRDFATVRKVLSMPQVNIVKKTEVQTGGFSKESILPKRNSDKLIARKKDWDPKKYGGFDSPTVAYSVLVVAKVEKGKSKKLKSVKELLGITIMERSSFEKNPIDFLEAKGYKEVKKDLIIKLPKYSLFELENGRKRMLASAGELQKGNELALPSKYVNFLYLASHYEKLKGSPEDNEQKQLFVEQHKHYLDEIIEQISEFSKRVILADANLDKVLSAYNKHRDKPIREQAENIIHLFTLTNLGAPAAFKYFDTTIDRKRYTSTKEVLDATLIHQSITGLYETRIDLSQLGGDSGGSGGSGGSTNLSDIIEKETGKQLVIQESILMLPEEVEEVIGNKPESDILVHTAYDESTDENVMLLTSDAPEYKPWALVIQDSNGENKIKMLSGGSGGSGGSTNLSDIIEKETGKQLVIQESILMLPEEVEEVIGNKPESDILVHTAYDESTDENVMLLTSDAPEYKPWALVIQDSNGENKIKMLSGGSKRTADGSEFEPKKKRKV

SEQ ID NO: 4 - protein, 2008 aa, Artificial sequence; identical to SEQ ID NO: 3
  Synthetic polypeptide

SEQ ID NO: 5 - protein, 2008 aa, Artificial sequence
  Synthetic polypeptide
MKRTADGSEFESPKKKRKVKPHFRNTVERMYRDTFSYNFYNRPILSRRNTVWLCYEVKTKGPSRPPLDAKIFRGQVYSELKYHPEMRFFHWFSKWRKLHRDQEYEVTWYISWSPCTKCTRDMATFLAEDPKVTLTIFVARLYYFWDPDYQEALRSLCQKRDGPRATMKIMNYDEFQHCWSKFVYSQRELFEPWNNLPKYYILLHIMLGEILRHSMDPPTFTFNFNNEPWVRGRHETYLCYEVERMHNDTWVLLNQRRGFLCNGAPHKHGFLEGRHAELCFLDVIPFWKLDLDQDYRVTCFTSWSPCFSCAQEMAKFISKNKHVSLCIFTARIYDDQGRCQEGLRTLAEAGAKISIMTYSEFKHCWDTFVDHQGCPFQPWDGLDEHSQDLSGRLRAILQNQENSGGSSGGSSGSETPGTSESATPESSGGSSGGSDKKYSIGLAIGTNSVGWAVITDEYKVPSKKFKVLGNTDRHSIKKNLIGALLFDSGETAEATRLKRTARRRYTRRKNRICYLQEIFSNEMAKVDDSFFHRLEESFLVEEDKKHERHPIFGNIVDEVAYHEKYPTIYHLRKKLVDSTDKADLRLIYLALAHMIKFRGHFLIEGDLNPDNSDVDKLFIQLVQTYNQLFEENPINASGVDAKAILSARLSKSRRLENLIAQLPGEKKNGLFGNLIALSLGLTPNFKSNFDLAEDAKLQLSKDTYDDDLDNLLAQIGDQYADLFLAAKNLSDAILLSDILRVNTEITKAPLSASMIKRYDEHHQDLTLLKALVRQQLPEKYKEIFFDQSKNGYAGYIDGGASQEEFYKFIKPILEKMDGTEELLVKLNREDLLRKQRTFDNGSIPHQIHLGELHAILRRQEDFYPFLKDNREKIEKILTFRIPYYVGPLARGNSRFAWMTRKSEETITPWNFEEVVDKGASAQSFIERMTNFDKNLPNEKVLPKHSLLYEYFTVYNELTKVKYVTEGMRKPAFLSGEQKKAIVDLLFKTNRKVTVKQLKEDYFKKIECFDSVEISGVEDRFNASLGTYHDLLKIIKDKDFLDNEENEDILEDIVLTLTLFEDREMIEERLKTYAHLFDDKVMKQLKRRRYTGWGRLSRKLINGIRDKQSGKTILDFLKSDGFANRNFMQLIHDDSLTFKEDIQKAQVSGQGDSLHEHIANLAGSPAIKKGILQTVKVVDELVKVMGRHKPENIVIEMARENQTTQKGQKNSRERMKRIEEGIKELGSQILKEHPVENTQLQNEKLYLYYLQNGRDMYVDQELDINRLSDYDVDHIVPQSFLKDDSIDNKVLTRSDKNRGKSDNVPSEEVVKKMKNYWRQLLNAKLITQRKFDNLTKAERGGLSELDKAGFIKRQLVETRQITKHVAQILDSRMNTKYDENDKLIREVKVITLKSKLVSDFRKDFQFYKVREINNYHHAHDAYLNAVVGTALIKKYPKLESEFVYGDYKVYDVRKMIAKSEQEIGKATAKYFFYSNIMNFFKTEITLANGEIRKRPLIETNGETGEIVWDKGRDFATVRKVLSMPQVNIVKKTEVQTGGFSKESILPKRNSDKLIARKKDWDPKKYGGFDSPTVAYSVLVVAKVEKGKSKKLKSVKELLGITIMERSSFEKNPIDFLEAKGYKEVKKDLIIKLPKYSLFELENGRKRMLASAGELQKGNELALPSKYVNFLYLASHYEKLKGSPEDNEQKQLFVEQHKHYLDEIIEQISEFSKRVILADANLDKVLSAYNKHRDKPIREQAENIIHLFTLTNLGAPAAFKYFDTTIDRKRYTSTKEVLDATLIHQSITGLYETRIDLSQLGGDSGGSGGSGGSTNLSDIIEKETGKQLVIQESILMLPEEVEEVIGNKPESDILVHTAYDESTDENVMLLTSDAPEYKPWALVIQDSNGENKIKMLSGGSGGSGGSTNLSDIIEKETGKQLVIQESILMLPEEVEEVIGNKPESDILVHTAYDESTDENVMLLTSDAPEYKPWALVIQDSNGENKIKMLSGGSKRTADGSEFEPKKKRKV

SEQ ID NO: 6 - protein, 2008 aa, Artificial sequence
  Synthetic polypeptide
MKRTADGSEFESPKKKRKVKPHFRNTVERMYRDTFSYNFYNRPILSRRNTVWLCYEVKTKGPSRPPLDAKIFRGQVYSELKYHPEMRFFHWFSKWRKLHRDQEYEVTWYISWSPCTKCTRDMATFLAEDPKVTLTIFVARLYYFWDPDYQEALRSLCQKRDGPRATMKIMNYDEFQHCWSKFVYSQRELFEPWNNLPKYYILLHIMLGEILRHSMDPPTFTFNFNNEPWVRGRHETYLCYEVERMHNDTWVLLNQRRGFLCNQAPHKHGFLEGRHAELCFLDVIPFWKLDLDQDYRVTCFTSWSPCFSCAQEMAKFISKNKHVSLCIFTARIFDDQGRCQEGLRTLAEAGAKISIMTYSEFKHCWDTFVDHQGCPFQPWDGLDEHSQDLSGRLRAILQNQENSGGSSGGSSGSETPGTSESATPESSGGSSGGSDKKYSIGLAIGTNSVGWAVITDEYKVPSKKFKVLGNTDRHSIKKNLIGALLFDSGETAEATRLKRTARRRYTRRKNRICYLQEIFSNEMAKVDDSFFHRLEESFLVEEDKKHERHPIFGNIVDEVAYHEKYPTIYHLRKKLVDSTDKADLRLIYLALAHMIKFRGHFLIEGDLNPDNSDVDKLFIQLVQTYNQLFEENPINASGVDAKAILSARLSKSRRLENLIAQLPGEKKNGLFGNLIALSLGLTPNFKSNFDLAEDAKLQLSKDTYDDDLDNLLAQIGDQYADLFLAAKNLSDAILLSDILRVNTEITKAPLSASMIKRYDEHHQDLTLLKALVRQQLPEKYKEIFFDQSKNGYAGYIDGGASQEEFYKFIKPILEKMDGTEELLVKLNREDLLRKQRTFDNGSIPHQIHLGELHAILRRQEDFYPFLKDNREKIEKILTFRIPYYVGPLARGNSRFAWMTRKSEETITPWNFEEVVDKGASAQSFIERMTNFDKNLPNEKVLPKHSLLYEYFTVYNELTKVKYVTEGMRKPAFLSGEQKKAIVDLLFKTNRKVTVKQLKEDYFKKIECFDSVEISGVEDRFNASLGTYHDLLKIIKDKDFLDNEENEDILEDIVLTLTLFEDREMIEERLKTYAHLFDDKVMKQLKRRRYTGWGRLSRKLINGIRDKQSGKTILDFLKSDGFANRNFMQLIHDDSLTFKEDIQKAQVSGQGDSLHEHIANLAGSPAIKKGILQTVKVVDELVKVMGRHKPENIVIEMARENQTTQKGQKNSRERMKRIEEGIKELGSQILKEHPVENTQLQNEKLYLYYLQNGRDMYVDQELDINRLSDYDVDHIVPQSFLKDDSIDNKVLTRSDKNRGKSDNVPSEEVVKKMKNYWRQLLNAKLITQRKFDNLTKAERGGLSELDKAGFIKRQLVETRQITKHVAQILDSRMNTKYDENDKLIREVKVITLKSKLVSDFRKDFQFYKVREINNYHHAHDAYLNAVVGTALIKKYPKLESEFVYGDYKVYDVRKMIAKSEQEIGKATAKYFFYSNIMNFFKTEITLANGEIRKRPLIETNGETGEIVWDKGRDFATVRKVLSMPQVNIVKKTEVQTGGFSKESILPKRNSDKLIARKKDWDPKKYGGFDSPTVAYSVLVVAKVEKGKSKKLKSVKELLGITIMERSSFEKNPIDFLEAKGYKEVKKDLIIKLPKYSLFELENGRKRMLASAGELQKGNELALPSKYVNFLYLASHYEKLKGSPEDNEQKQLFVEQHKHYLDEIIEQISEFSKRVILADANLDKVLSAYNKHRDKPIREQAENIIHLFTLTNLGAPAAFKYFDTTIDRKRYTSTKEVLDATLIHQSITGLYETRIDLSQLGGDSGGSGGSGGSTNLSDIIEKETGKQLVIQESILMLPEEVEEVIGNKPESDILVHTAYDESTDENVMLLTSDAPEYKPWALVIQDSNGENKIKMLSGGSGGSGGSTNLSDIIEKETGKQLVIQESILMLPEEVEEVIGNKPESDILVHTAYDESTDENVMLLTSDAPEYKPWALVIQDSNGENKIKMLSGGSKRTADGSEFEPKKKRKV

SEQ ID NO: 7 - protein, 2008 aa, Artificial sequence
  Synthetic polypeptide
MKRTADGSEFESPKKKRKVKPHFRNTVERMYRDTFSYNFYNRPILSRRNTVWLCYEVKTKGPSRPPLDAKIFRGQVYSELKYHPEMRFFHWFSKWRKLHRDQEYEVTWYISWSPCTKCTRDMATFLAEDPKVTLTIFVARLYYFWDPDYQEALRSLCQKRDGPRATMKIMNYDEFQHCWSKFVYSQRELFEPWNNLPKYYILLHIMLGEILRHSMDPATFTFNFNNEPWVRGRHETYLCYEVERMHNDTWVLLAQRRGFLCNQAKHKHGFLEGRHAELCFLDVIPFWKLDLDQDYRVTCFTSWSPCFSCAQEMAKFISKNKHVSLCIFTARIYDDKGRCKEGLRTLAEAGAKISIMTYSEFKHCWDTFVDHQGCPFQPWDGLDEHSQDLSGRLRAILQNQENSGGSSGGSSGSETPGTSESATPESSGGSSGGSDKKYSIGLAIGTNSVGWAVITDEYKVPSKKFKVLGNTDRHSIKKNLIGALLFDSGETAEATRLKRTARRRYTRRKNRICYLQEIFSNEMAKVDDSFFHRLEESFLVEEDKKHERHPIFGNIVDEVAYHEKYPTIYHLRKKLVDSTDKADLRLIYLALAHMIKFRGHFLIEGDLNPDNSDVDKLFIQLVQTYNQLFEENPINASGVDAKAILSARLSKSRRLENLIAQLPGEKKNGLFGNLIALSLGLTPNFKSNFDLAEDAKLQLSKDTYDDDLDNLLAQIGDQYADLFLAAKNLSDAILLSDILRVNTEITKAPLSASMIKRYDEHHQDLTLLKALVRQQLPEKYKEIFFDQSKNGYAGYIDGGASQEEFYKFIKPILEKMDGTEELLVKLNREDLLRKQRTFDNGSIPHQIHLGELHAILRRQEDFYPFLKDNREKIEKILTFRIPYYVGPLARGNSRFAWMTRKSEETITPWNFEEVVDKGASAQSFIERMTNFDKNLPNEKVLPKHSLLYEYFTVYNELTKVKYVTEGMRKPAFLSGEQKKAIVDLLFKTNRKVTVKQLKEDYFKKIECFDSVEISGVEDRFNASLGTYHDLLKIIKDKDFLDNEENEDILEDIVLTLTLFEDREMIEERLKTYAHLFDDKVMKQLKRRRYTGWGRLSRKLINGIRDKQSGKTILDFLKSDGFANRNFMQLIHDDSLTFKEDIQKAQVSGQGDSLHEHIANLAGSPAIKKGILQTVKVVDELVKVMGRHKPENIVIEMARENQTTQKGQKNSRERMKRIEEGIKELGSQILKEHPVENTQLQNEKLYLYYLQNGRDMYVDQELDINRLSDYDVDHIVPQSFLKDDSIDNKVLTRSDKNRGKSDNVPSEEVVKKMKNYWRQLLNAKLITQRKFDNLTKAERGGLSELDKAGFIKRQLVETRQITKHVAQILDSRMNTKYDENDKLIREVKVITLKSKLVSDFRKDFQFYKVREINNYHHAHDAYLNAVVGTALIKKYPKLESEFVYGDYKVYDVRKMIAKSEQEIGKATAKYFFYSNIMNFFKTEITLANGEIRKRPLIETNGETGEIVWDKGRDFATVRKVLSMPQVNIVKKTEVQTGGFSKESILPKRNSDKLIARKKDWDPKKYGGFDSPTVAYSVLVVAKVEKGKSKKLKSVKELLGITIMERSSFEKNPIDFLEAKGYKEVKKDLIIKLPKYSLFELENGRKRMLASAGELQKGNELALPSKYVNFLYLASHYEKLKGSPEDNEQKQLFVEQHKHYLDEIIEQISEFSKRVILADANLDKVLSAYNKHRDKPIREQAENIIHLFTLTNLGAPAAFKYFDTTIDRKRYTSTKEVLDATLIHQSITGLYETRIDLSQLGGDSGGSGGSGGSTNLSDIIEKETGKQLVIQESILMLPEEVEEVIGNKPESDILVHTAYDESTDENVMLLTSDAPEYKPWALVIQDSNGENKIKMLSGGSGGSGGSTNLSDIIEKETGKQLVIQESILMLPEEVEEVIGNKPESDILVHTAYDESTDENVMLLTSDAPEYKPWALVIQDSNGENKIKMLSGGSKRTADGSEFEPKKKRKV

SEQ ID NO: 8 - protein, 2008 aa, Artificial sequence
  Synthetic polypeptide
MKRTADGSEFESPKKKRKVKPHFRNTVERMYRDTFSYNFYNRPILSRRNTVWLCYEVKTKGPSRPPLDAKIFRGQVYSELKYHPEMRFFHWFSKWRKLHRDQEYEVTWYISWSPCTKCTRDMATFLAEDPKVTLTIFVARLYYFWDPDYQEALRSLCQKRDGPRATMKIMNYDEFQHCWSKFVYSQRELFEPWNNLPKYYILLHIMLGEILRHSMDPATFTFNFNNEPWVRGRHETYLCYEVERMHNDTWVLLAQRRGFLCGQAKHKHGFLEGRHAELCFLDVIPFWKLDLDQDYRVTCFTSWSPCFSCAQEMAKFISKNKHVSLCIFTARIYDDKGRCKEGLRTLAEAGAKISIMTYSEFKHCWDTFVDHQGCPFQPWDGLDEHSQDLSGRLRAILQNQENSGGSSGGSSGSETPGTSESATPESSGGSSGGSDKKYSIGLAIGTNSVGWAVITDEYKVPSKKFKVLGNTDRHSIKKNLIGALLFDSGETAEATRLKRTARRRYTRRKNRICYLQEIFSNEMAKVDDSFFHRLEESFLVEEDKKHERHPIFGNIVDEVAYHEKYPTIYHLRKKLVDSTDKADLRLIYLALAHMIKFRGHFLIEGDLNPDNSDVDKLFIQLVQTYNQLFEENPINASGVDAKAILSARLSKSRRLENLIAQLPGEKKNGLFGNLIALSLGLTPNFKSNFDLAEDAKLQLSKDTYDDDLDNLLAQIGDQYADLFLAAKNLSDAILLSDILRVNTEITKAPLSASMIKRYDEHHQDLTLLKALVRQQLPEKYKEIFFDQSKNGYAGYIDGGASQEEFYKFIKPILEKMDGTEELLVKLNREDLLRKQRTFDNGSIPHQIHLGELHAILRRQEDFYPFLKDNREKIEKILTFRIPYYVGPLARGNSRFAWMTRKSEETITPWNFEEVVDKGASAQSFIERMTNFDKNLPNEKVLPKHSLLYEYFTVYNELTKVKYVTEGMRKPAFLSGEQKKAIVDLLFKTNRKVTVKQLKEDYFKKIECFDSVEISGVEDRFNASLGTYHDLLKIIKDKDFLDNEENEDILEDIVLTLTLFEDREMIEERLKTYAHLFDDKVMKQLKRRRYTGWGRLSRKLINGIRDKQSGKTILDFLKSDGFANRNFMQLIHDDSLTFKEDIQKAQVSGQGDSLHEHIANLAGSPAIKKGILQTVKVVDELVKVMGRHKPENIVIEMARENQTTQKGQKNSRERMKRIEEGIKELGSQILKEHPVENTQLQNEKLYLYYLQNGRDMYVDQELDINRLSDYDVDHIVPQSFLKDDSIDNKVLTRSDKNRGKSDNVPSEEVVKKMKNYWRQLLNAKLITQRKFDNLTKAERGGLSELDKAGFIKRQLVETRQITKHVAQILDSRMNTKYDENDKLIREVKVITLKSKLVSDFRKDFQFYKVREINNYHHAHDAYLNAVVGTALIKKYPKLESEFVYGDYKVYDVRKMIAKSEQEIGKATAKYFFYSNIMNFFKTEITLANGEIRKRPLIETNGETGEIVWDKGRDFATVRKVLSMPQVNIVKKTEVQTGGFSKESILPKRNSDKLIARKKDWDPKKYGGFDSPTVAYSVLVVAKVEKGKSKKLKSVKELLGITIMERSSFEKNPIDFLEAKGYKEVKKDLIIKLPKYSLFELENGRKRMLASAGELQKGNELALPSKYVNFLYLASHYEKLKGSPEDNEQKQLFVEQHKHYLDEIIEQISEFSKRVILADANLDKVLSAYNKHRDKPIREQAENIIHLFTLTNLGAPAAFKYFDTTIDRKRYTSTKEVLDATLIHQSITGLYETRIDLSQLGGDSGGSGGSGGSTNLSDIIEKETGKQLVIQESILMLPEEVEEVIGNKPESDILVHTAYDESTDENVMLLTSDAPEYKPWALVIQDSNGENKIKMLSGGSGGSGGSTNLSDIIEKETGKQLVIQESILMLPEEVEEVIGNKPESDILVHTAYDESTDENVMLLTSDAPEYKPWALVIQDSNGENKIKMLSGGSKRTADGSEFEPKKKRKV

SEQ ID NO: 9 - protein, 2008 aa, Artificial sequence
  Synthetic polypeptide
MKRTADGSEFESPKKKRKVKPHFRNTVERMYRDTFSYNFYNRPILSRRNTVWLCYEVKTKGPSRPPLDAKIFRGQVYSELKYHPEMRFFHWFSKWRKLHRDQEYEVTWYISWSPCTKCTRDMATFLAEDPKVTLTIFVARLYYFWDPDYQEALRSLCQKRDGPRATMKIMNYDEFQHCWSKFVYSQRELFEPWNNLPKYYILLHIMLGEILRHSMDPATFTFNFNNEPWVRGRHETYLCYEVERMHNDTWVLLAQRRGFLCNQAKHKHGFLEGRHAELCFLDVIPFWKLDLDQDYRVTCFTSWSPCFSCAQEMAKFISKNKHVSLCIFTARIFDDKGRCKEGLRTLAEAGAKISIMTYSEFKHCWDTFVDHQGCPFQPWDGLDEHSQDLSGRLRAILQNQENSGGSSGGSSGSETPGTSESATPESSGGSSGGSDKKYSIGLAIGTNSVGWAVITDEYKVPSKKFKVLGNTDRHSIKKNLIGALLFDSGETAEATRLKRTARRRYTRRKNRICYLQEIFSNEMAKVDDSFFHRLEESFLVEEDKKHERHPIFGNIVDEVAYHEKYPTIYHLRKKLVDSTDKADLRLIYLALAHMIKFRGHFLIEGDLNPDNSDVDKLFIQLVQTYNQLFEENPINASGVDAKAILSARLSKSRRLENLIAQLPGEKKNGLFGNLIALSLGLTPNFKSNFDLAEDAKLQLSKDTYDDDLDNLLAQIGDQYADLFLAAKNLSDAILLSDILRVNTEITKAPLSASMIKRYDEHHQDLTLLKALVRQQLPEKYKEIFFDQSKNGYAGYIDGGASQEEFYKFIKPILEKMDGTEELLVKLNREDLLRKQRTFDNGSIPHQIHLGELHAILRRQEDFYPFLKDNREKIEKILTFRIPYYVGPLARGNSRFAWMTRKSEETITPWNFEEVVDKGASAQSFIERMTNFDKNLPNEKVLPKHSLLYEYFTVYNELTKVKYVTEGMRKPAFLSGEQKKAIVDLLFKTNRKVTVKQLKEDYFKKIECFDSVEISGVEDRFNASLGTYHDLLKIIKDKDFLDNEENEDILEDIVLTLTLFEDREMIEERLKTYAHLFDDKVMKQLKRRRYTGWGRLSRKLINGIRDKQSGKTILDFLKSDGFANRNFMQLIHDDSLTFKEDIQKAQVSGQGDSLHEHIANLAGSPAIKKGILQTVKVVDELVKVMGRHKPENIVIEMARENQTTQKGQKNSRERMKRIEEGIKELGSQILKEHPVENTQLQNEKLYLYYLQNGRDMYVDQELDINRLSDYDVDHIVPQSFLKDDSIDNKVLTRSDKNRGKSDNVPSEEVVKKMKNYWRQLLNAKLITQRKFDNLTKAERGGLSELDKAGFIKRQLVETRQITKHVAQILDSRMNTKYDENDKLIREVKVITLKSKLVSDFRKDFQFYKVREINNYHHAHDAYLNAVVGTALIKKYPKLESEFVYGDYKVYDVRKMIAKSEQEIGKATAKYFFYSNIMNFFKTEITLANGEIRKRPLIETNGETGEIVWDKGRDFATVRKVLSMPQVNIVKKTEVQTGGFSKESILPKRNSDKLIARKKDWDPKKYGGFDSPTVAYSVLVVAKVEKGKSKKLKSVKELLGITIMERSSFEKNPIDFLEAKGYKEVKKDLIIKLPKYSLFELENGRKRMLASAGELQKGNELALPSKYVNFLYLASHYEKLKGSPEDNEQKQLFVEQHKHYLDEIIEQISEFSKRVILADANLDKVLSAYNKHRDKPIREQAENIIHLFTLTNLGAPAAFKYFDTTIDRKRYTSTKEVLDATLIHQSITGLYETRIDLSQLGGDSGGSGGSGGSTNLSDIIEKETGKQLVIQESILMLPEEVEEVIGNKPESDILVHTAYDESTDENVMLLTSDAPEYKPWALVIQDSNGENKIKMLSGGSGGSGGSTNLSDIIEKETGKQLVIQESILMLPEEVEEVIGNKPESDILVHTAYDESTDENVMLLTSDAPEYKPWALVIQDSNGENKIKMLSGGSKRTADGSEFEPKKKRKV

SEQ ID NO: 10 - protein, 2008 aa, Artificial sequence
  Synthetic polypeptide
MKRTADGSEFESPKKKRKVKPHFRNTVERMYRDTFSYNFYNRPILSRRNTVWLCYEVKTKGPSRPPLDAKIFRGQVYSELKYHPEMRFFHWFSKWRKLHRDQEYEVTWYISWSPCTKCTRDMATFLAEDPKVTLTIFVARLYYFWDPDYQEALRSLCQKRDGPRATMKIMNYDEFQHCWSKFVYSQRELFEPWNNLPKYYILLHIMLGEILRHSMDPATFTFNFNNEPWVRGRHETYLCYEVERMHNDTWVLLAQRRGFLCNQAKNLLCGFYGRHAELCFLDVIPFWKLDLDQDYRVTCFTSWSPCFSCAQEMAKFISKNKHVSLCIFTARIYDDKGRCKEGLRTLAEAGAKISIMTYSEFKHCWDTFVDHQGCPFQPWDGLDEHSQDLSGRLRAILQNQENSGGSSGGSSGSETPGTSESATPESSGGSSGGSDKKYSIGLAIGTNSVGWAVITDEYKVPSKKFKVLGNTDRHSIKKNLIGALLFDSGETAEATRLKRTARRRYTRRKNRICYLQEIFSNEMAKVDDSFFHRLEESFLVEEDKKHERHPIFGNIVDEVAYHEKYPTIYHLRKKLVDSTDKADLRLIYLALAHMIKFRGHFLIEGDLNPDNSDVDKLFIQLVQTYNQLFEENPINASGVDAKAILSARLSKSRRLENLIAQLPGEKKNGLFGNLIALSLGLTPNFKSNFDLAEDAKLQLSKDTYDDDLDNLLAQIGDQYADLFLAAKNLSDAILLSDILRVNTEITKAPLSASMIKRYDEHHQDLTLLKALVRQQLPEKYKEIFFDQSKNGYAGYIDGGASQEEFYKFIKPILEKMDGTEELLVKLNREDLLRKQRTFDNGSIPHQIHLGELHAILRRQEDFYPFLKDNREKIEKILTFRIPYYVGPLARGNSRFAWMTRKSEETITPWNFEEVVDKGASAQSFIERMTNFDKNLPNEKVLPKHSLLYEYFTVYNELTKVKYVTEGMRKPAFLSGEQKKAIVDLLFKTNRKVTVKQLKEDYFKKIECFDSVEISGVEDRFNASLGTYHDLLKIIKDKDFLDNEENEDILEDIVLTLTLFEDREMIEERLKTYAHLFDDKVMKQLKRRRYTGWGRLSRKLINGIRDKQSGKTILDFLKSDGFANRNFMQLIHDDSLTFKEDIQKAQVSGQGDSLHEHIANLAGSPAIKKGILQTVKVVDELVKVMGRHKPENIVIEMARENQTTQKGQKNSRERMKRIEEGIKELGSQILKEHPVENTQLQNEKLYLYYLQNGRDMYVDQELDINRLSDYDVDHIVPQSFLKDDSIDNKVLTRSDKNRGKSDNVPSEEVVKKMKNYWRQLLNAKLITQRKFDNLTKAERGGLSELDKAGFIKRQLVETRQITKHVAQILDSRMNTKYDENDKLIREVKVITLKSKLVSDFRKDFQFYKVREINNYHHAHDAYLNAVVGTALIKKYPKLESEFVYGDYKVYDVRKMIAKSEQEIGKATAKYFFYSNIMNFFKTEITLANGEIRKRPLIETNGETGEIVWDKGRDFATVRKVLSMPQVNIVKKTEVQTGGFSKESILPKRNSDKLIARKKDWDPKKYGGFDSPTVAYSVLVVAKVEKGKSKKLKSVKELLGITIMERSSFEKNPIDFLEAKGYKEVKKDLIIKLPKYSLFELENGRKRMLASAGELQKGNELALPSKYVNFLYLASHYEKLKGSPEDNEQKQLFVEQHKHYLDEIIEQISEFSKRVILADANLDKVLSAYNKHRDKPIREQAENIIHLFTLTNLGAPAAFKYFDTTIDRKRYTSTKEVLDATLIHQSITGLYETRIDLSQLGGDSGGSGGSGGSTNLSDIIEKETGKQLVIQESILMLPEEVEEVIGNKPESDILVHTAYDESTDENVMLLTSDAPEYKPWALVIQDSNGENKIKMLSGGSGGSGGSTNLSDIIEKETGKQLVIQESILMLPEEVEEVIGNKPESDILVHTAYDESTDENVMLLTSDAPEYKPWALVIQDSNGENKIKMLSGGSKRTADGSEFEPKKKRKV

SEQ ID NO: 11 - protein, 2008 aa, Artificial sequence
  Synthetic polypeptide
MKRTADGSEFESPKKKRKVKPHFRNTVERMYRDTFSYNFYNRPILSRRNTVWLCYEVKTKGPSRPPLDAKIFRGQVYSELKYHPEMRFFHWFSKWRKLHRDQEYEVTWYISWSPCTKCTRDMATFLAEDPKVTLTIFVARLYYFWDPDYQEALRSLCQKRDGPRATMKIMNYDEFQHCWSKFVYSQRELFEPWNNLPKYYILLHIMLGEILRHSMDPATFTFNFNNEPWVRGRHETYLCYEVERMHNDTWVKLAQRRGFLANQAKHKHGFLEGRHAELCFLDVIPFWKLDLDQDYRVTCFTSWSPCFSCAQEMAKFISKNKHVSLCIKTARIYDDKGRAKEGLRTLAEAGAKISIMTYSEFKHCWDTFVDHQGAPFQPWDGLDEHSQDLSGRLRAILQNQENSGGSSGGSSGSETPGTSESATPESSGGSSGGSDKKYSIGLAIGTNSVGWAVITDEYKVPSKKFKVLGNTDRHSIKKNLIGALLFDSGETAEATRLKRTARRRYTRRKNRICYLQEIFSNEMAKVDDSFFHRLEESFLVEEDKKHERHPIFGNIVDEVAYHEKYPTIYHLRKKLVDSTDKADLRLIYLALAHMIKFRGHFLIEGDLNPDNSDVDKLFIQLVQTYNQLFEENPINASGVDAKAILSARLSKSRRLENLIAQLPGEKKNGLFGNLIALSLGLTPNFKSNFDLAEDAKLQLSKDTYDDDLDNLLAQIGDQYADLFLAAKNLSDAILLSDILRVNTEITKAPLSASMIKRYDEHHQDLTLLKALVRQQLPEKYKEIFFDQSKNGYAGYIDGGASQEEFYKFIKPILEKMDGTEELLVKLNREDLLRKQRTFDNGSIPHQIHLGELHAILRRQEDFYPFLKDNREKIEKILTFRIPYYVGPLARGNSRFAWMTRKSEETITPWNFEEVVDKGASAQSFIERMTNFDKNLPNEKVLPKHSLLYEYFTVYNELTKVKYVTEGMRKPAFLSGEQKKAIVDLLFKTNRKVTVKQLKEDYFKKIECFDSVEISGVEDRFNASLGTYHDLLKIIKDKDFLDNEENEDILEDIVLTLTLFEDREMIEERLKTYAHLFDDKVMKQLKRRRYTGWGRLSRKLINGIRDKQSGKTILDFLKSDGFANRNFMQLIHDDSLTFKEDIQKAQVSGQGDSLHEHIANLAGSPAIKKGILQTVKVVDELVKVMGRHKPENIVIEMARENQTTQKGQKNSRERMKRIEEGIKELGSQILKEHPVENTQLQNEKLYLYYLQNGRDMYVDQELDINRLSDYDVDHIVPQSFLKDDSIDNKVLTRSDKNRGKSDNVPSEEVVKKMKNYWRQLLNAKLITQRKFDNLTKAERGGLSELDKAGFIKRQLVETRQITKHVAQILDSRMNTKYDENDKLIREVKVITLKSKLVSDFRKDFQFYKVREINNYHHAHDAYLNAVVGTALIKKYPKLESEFVYGDYKVYDVRKMIAKSEQEIGKATAKYFFYSNIMNFFKTEITLANGEIRKRPLIETNGETGEIVWDKGRDFATVRKVLSMPQVNIVKKTEVQTGGFSKESILPKRNSDKLIARKKDWDPKKYGGFDSPTVAYSVLVVAKVEKGKSKKLKSVKELLGITIMERSSFEKNPIDFLEAKGYKEVKKDLIIKLPKYSLFELENGRKRMLASAGELQKGNELALPSKYVNFLYLASHYEKLKGSPEDNEQKQLFVEQHKHYLDEIIEQISEFSKRVILADANLDKVLSAYNKHRDKPIREQAENIIHLFTLTNLGAPAAFKYFDTTIDRKRYTSTKEVLDATLIHQSITGLYETRIDLSQLGGDSGGSGGSGGSTNLSDIIEKETGKQLVIQESILMLPEEVEEVIGNKPESDILVHTAYDESTDENVMLLTSDAPEYKPWALVIQDSNGENKIKMLSGGSGGSGGSTNLSDIIEKETGKQLVIQESILMLPEEVEEVIGNKPESDILVHTAYDESTDENVMLLTSDAPEYKPWALVIQDSNGENKIKMLSGGSKRTADGSEFEPKKKRKV

SEQ ID NO: 12 - protein, 2008 aa, Artificial sequence
  Synthetic polypeptide
MKRTADGSEFESPKKKRKVKPHFRNTVERMYRDTFSYNFYNRPILSRRNTVWLCYEVKTKGPSRPPLDAKIFRGQVYSELKYHPEMRFFHWFSKWRKLHRDQEYEVTWYISWSPCTKCTRDMATFLAEDPKVTLTIFVARLYYFWDPDYQEALRSLCQKRDGPRATMKIMNYDEFQHCWSKFVYSQRELFEPWNNLPKYYILLHIMLGEILRHSMDPATFTFNFNNEPWVRGRHETYLCYEVERMHNDTWVKLAQRRGFLANQAKNLLCGFYGRHAELCFLDVIPFWKLDLDQDYRVTCFTSWSPCFSCAQEMAKFISKNKHVSLCIKTARIYDDKGRAKEGLRTLAEAGAKISIMTYSEFKHCWDTFVDHQGAPFQPWDGLDEHSQDLSGRLRAILQNQENSGGSSGGSSGSETPGTSESATPESSGGSSGGSDKKYSIGLAIGTNSVGWAVITDEYKVPSKKFKVLGNTDRHSIKKNLIGALLFDSGETAEATRLKRTARRRYTRRKNRICYLQEIFSNEMAKVDDSFFHRLEESFLVEEDKKHERHPIFGNIVDEVAYHEKYPTIYHLRKKLVDSTDKADLRLIYLALAHMIKFRGHFLIEGDLNPDNSDVDKLFIQLVQTYNQLFEENPINASGVDAKAILSARLSKSRRLENLIAQLPGEKKNGLFGNLIALSLGLTPNFKSNFDLAEDAKLQLSKDTYDDDLDNLLAQIGDQYADLFLAAKNLSDAILLSDILRVNTEITKAPLSASMIKRYDEHHQDLTLLKALVRQQLPEKYKEIFFDQSKNGYAGYIDGGASQEEFYKFIKPILEKMDGTEELLVKLNREDLLRKQRTFDNGSIPHQIHLGELHAILRRQEDFYPFLKDNREKIEKILTFRIPYYVGPLARGNSRFAWMTRKSEETITPWNFEEVVDKGASAQSFIERMTNFDKNLPNEKVLPKHSLLYEYFTVYNELTKVKYVTEGMRKPAFLSGEQKKAIVDLLFKTNRKVTVKQLKEDYFKKIECFDSVEISGVEDRFNASLGTYHDLLKIIKDKDFLDNEENEDILEDIVLTLTLFEDREMIEERLKTYAHLFDDKVMKQLKRRRYTGWGRLSRKLINGIRDKQSGKTILDFLKSDGFANRNFMQLIHDDSLTFKEDIQKAQVSGQGDSLHEHIANLAGSPAIKKGILQTVKVVDELVKVMGRHKPENIVIEMARENQTTQKGQKNSRERMKRIEEGIKELGSQILKEHPVENTQLQNEKLYLYYLQNGRDMYVDQELDINRLSDYDVDHIVPQSFLKDDSIDNKVLTRSDKNRGKSDNVPSEEVVKKMKNYWRQLLNAKLITQRKFDNLTKAERGGLSELDKAGFIKRQLVETRQITKHVAQILDSRMNTKYDENDKLIREVKVITLKSKLVSDFRKDFQFYKVREINNYHHAHDAYLNAVVGTALIKKYPKLESEFVYGDYKVYDVRKMIAKSEQEIGKATAKYFFYSNIMNFFKTEITLANGEIRKRPLIETNGETGEIVWDKGRDFATVRKVLSMPQVNIVKKTEVQTGGFSKESILPKRNSDKLIARKKDWDPKKYGGFDSPTVAYSVLVVAKVEKGKSKKLKSVKELLGITIMERSSFEKNPIDFLEAKGYKEVKKDLIIKLPKYSLFELENGRKRMLASAGELQKGNELALPSKYVNFLYLASHYEKLKGSPEDNEQKQLFVEQHKHYLDEIIEQISEFSKRVILADANLDKVLSAYNKHRDKPIREQAENIIHLFTLTNLGAPAAFKYFDTTIDRKRYTSTKEVLDATLIHQSITGLYETRIDLSQLGGDSGGSGGSGGSTNLSDIIEKETGKQLVIQESILMLPEEVEEVIGNKPESDILVHTAYDESTDENVMLLTSDAPEYKPWALVIQDSNGENKIKMLSGGSGGSGGSTNLSDIIEKETGKQLVIQESILMLPEEVEEVIGNKPESDILVHTAYDESTDENVMLLTSDAPEYKPWALVIQDSNGENKIKMLSGGSKRTADGSEFEPKKKRKV

SEQ ID NO: 13 - protein, 1812 aa, Artificial sequence
  Synthetic polypeptide
MKRTADGSEFESPKKKRKVDPPTFTFNFNNEPWVRGRHETYLCYEVERMHNDTWVLLNQRRGFLCNQAPHKHGFLEGRHAELCFLDVIPFWKLDLDQDYRVTCFTSWSPCFSCAQEMAKFISKNKHVSLCIFTARIYDDQGRCQEGLRTLAEAGAKISIMTYSEFKHCWDTFVDHQGCPFQPWDGLDEHSQDLSGRLRAILQNQENSGGSSGGSSGSETPGTSESATPESSGGSSGGSDKKYSIGLAIGTNSVGWAVITDEYKVPSKKFKVLGNTDRHSIKKNLIGALLFDSGETAEATRLKRTARRRYTRRKNRICYLQEIFSNEMAKVDDSFFHRLEESFLVEEDKKHERHPIFGNIVDEVAYHEKYPTIYHLRKKLVDSTDKADLRLIYLALAHMIKFRGHFLIEGDLNPDNSDVDKLFIQLVQTYNQLFEENPINASGVDAKAILSARLSKSRRLENLIAQLPGEKKNGLFGNLIALSLGLTPNFKSNFDLAEDAKLQLSKDTYDDDLDNLLAQIGDQYADLFLAAKNLSDAILLSDILRVNTEITKAPLSASMIKRYDEHHQDLTLLKALVRQQLPEKYKEIFFDQSKNGYAGYIDGGASQEEFYKFIKPILEKMDGTEELLVKLNREDLLRKQRTFDNGSIPHQIHLGELHAILRRQEDFYPFLKDNREKIEKILTFRIPYYVGPLARGNSRFAWMTRKSEETITPWNFEEVVDKGASAQSFIERMTNFDKNLPNEKVLPKHSLLYEYFTVYNELTKVKYVTEGMRKPAFLSGEQKKAIVDLLFKTNRKVTVKQLKEDYFKKIECFDSVEISGVEDRFNASLGTYHDLLKIIKDKDFLDNEENEDILEDIVLTLTLFEDREMIEERLKTYAHLFDDKVMKQLKRRRYTGWGRLSRKLINGIRDKQSGKTILDFLKSDGFANRNFMQLIHDDSLTFKEDIQKAQVSGQGDSLHEHIANLAGSPAIKKGILQTVKVVDELVKVMGRHKPENIVIEMARENQTTQKGQKNSRERMKRIEEGIKELGSQILKEHPVENTQLQNEKLYLYYLQNGRDMYVDQELDINRLSDYDVDHIVPQSFLKDDSIDNKVLTRSDKNRGKSDNVPSEEVVKKMKNYWRQLLNAKLITQRKFDNLTKAERGGLSELDKAGFIKRQLVETRQITKHVAQILDSRMNTKYDENDKLIREVKVITLKSKLVSDFRKDFQFYKVREINNYHHAHDAYLNAVVGTALIKKYPKLESEFVYGDYKVYDVRKMIAKSEQEIGKATAKYFFYSNIMNFFKTEITLANGEIRKRPLIETNGETGEIVWDKGRDFATVRKVLSMPQVNIVKKTEVQTGGFSKESILPKRNSDKLIARKKDWDPKKYGGFDSPTVAYSVLVVAKVEKGKSKKLKSVKELLGITIMERSSFEKNPIDFLEAKGYKEVKKDLIIKLPKYSLFELENGRKRMLASAGELQKGNELALPSKYVNFLYLASHYEKLKGSPEDNEQKQLFVEQHKHYLDEIIEQISEFSKRVILADANLDKVLSAYNKHRDKPIREQAENIIHLFTLTNLGAPAAFKYFDTTIDRKRYTSTKEVLDATLIHQSITGLYETRIDLSQLGGDSGGSGGSGGSTNLSDIIEKETGKQLVIQESILMLPEEVEEVIGNKPESDILVHTAYDESTDENVMLLTSDAPEYKPWALVIQDSNGENKIKMLSGGSGGSGGSTNLSDIIEKETGKQLVIQESILMLPEEVEEVIGNKPESDILVHTAYDESTDENVMLLTSDAPEYKPWALVIQDSNGENKIKMLSGGSKRTADGSEFEPKKKRKV

SEQ ID NO: 14 - protein, 1812 aa, Artificial sequence
  Synthetic polypeptide
MKRTADGSEFESPKKKRKVDPPTFTFNFNNEPWVRGRHETYLCYEVERMHNDTWVLLNQRRGFLCNQAPHKHGFLEGRHAELCFLDVIPFWKLDLDQDYRVTCFTSWSPCFSCAQEMAKFISKNKHVSLCIFTARIYRRQGRCQEGLRTLAEAGAKISIMTYSEFKHCWDTFVDHQGCPFQPWDGLDEHSQDLSGRLRAILQNQENSGGSSGGSSGSETPGTSESATPESSGGSSGGSDKKYSIGLAIGTNSVGWAVITDEYKVPSKKFKVLGNTDRHSIKKNLIGALLFDSGETAEATRLKRTARRRYTRRKNRICYLQEIFSNEMAKVDDSFFHRLEESFLVEEDKKHERHPIFGNIVDEVAYHEKYPTIYHLRKKLVDSTDKADLRLIYLALAHMIKFRGHFLIEGDLNPDNSDVDKLFIQLVQTYNQLFEENPINASGVDAKAILSARLSKSRRLENLIAQLPGEKKNGLFGNLIALSLGLTPNFKSNFDLAEDAKLQLSKDTYDDDLDNLLAQIGDQYADLFLAAKNLSDAILLSDILRVNTEITKAPLSASMIKRYDEHHQDLTLLKALVRQQLPEKYKEIFFDQSKNGYAGYIDGGASQEEFYKFIKPILEKMDGTEELLVKLNREDLLRKQRTFDNGSIPHQIHLGELHAILRRQEDFYPFLKDNREKIEKILTFRIPYYVGPLARGNSRFAWMTRKSEETITPWNFEEVVDKGASAQSFIERMTNFDKNLPNEKVLPKHSLLYEYFTVYNELTKVKYVTEGMRKPAFLSGEQKKAIVDLLFKTNRKVTVKQLKEDYFKKIECFDSVEISGVEDRFNASLGTYHDLLKIIKDKDFLDNEENEDILEDIVLTLTLFEDREMIEERLKTYAHLFDDKVMKQLKRRRYTGWGRLSRKLINGIRDKQSGKTILDFLKSDGFANRNFMQLIHDDSLTFKEDIQKAQVSGQGDSLHEHIANLAGSPAIKKGILQTVKVVDELVKVMGRHKPENIVIEMARENQTTQKGQKNSRERMKRIEEGIKELGSQILKEHPVENTQLQNEKLYLYYLQNGRDMYVDQELDINRLSDYDVDHIVPQSFLKDDSIDNKVLTRSDKNRGKSDNVPSEEVVKKMKNYWRQLLNAKLITQRKFDNLTKAERGGLSELDKAGFIKRQLVETRQITKHVAQILDSRMNTKYDENDKLIREVKVITLKSKLVSDFRKDFQFYKVREINNYHHAHDAYLNAVVGTALIKKYPKLESEFVYGDYKVYDVRKMIAKSEQEIGKATAKYFFYSNIMNFFKTEITLANGEIRKRPLIETNGETGEIVWDKGRDFATVRKVLSMPQVNIVKKTEVQTGGFSKESILPKRNSDKLIARKKDWDPKKYGGFDSPTVAYSVLVVAKVEKGKSKKLKSVKELLGITIMERSSFEKNPIDFLEAKGYKEVKKDLIIKLPKYSLFELENGRKRMLASAGELQKGNELALPSKYVNFLYLASHYEKLKGSPEDNEQKQLFVEQHKHYLDEIIEQISEFSKRVILADANLDKVLSAYNKHRDKPIREQAENIIHLFTLTNLGAPAAFKYFDTTIDRKRYTSTKEVLDATLIHQSITGLYETRIDLSQLGGDSGGSGGSGGSTNLSDIIEKETGKQLVIQESILMLPEEVEEVIGNKPESDILVHTAYDESTDENVMLLTSDAPEYKPWALVIQDSNGENKIKMLSGGSGGSGGSTNLSDIIEKETGKQLVIQESILMLPEEVEEVIGNKPESDILVHTAYDESTDENVMLLTSDAPEYKPWALVIQDSNGENKIKMLSGGSKRTADGSEFEPKKKRKV

SEQ ID NO: 15 - protein, 1812 aa, Artificial sequence
  Synthetic polypeptide
MKRTADGSEFESPKKKRKVDPATFTFNFNNEPWVRGRHETYLCYEVERMHNDTWVLLAQRRGFLCNQAKHKHGFLEGRHAELCFLDVIPFWKLDLDQDYRVTCFTSWSPCFSCAQEMAKFISKNKHVSLCIFTARIYDDKGRCKEGLRTLAEAGAKISIMTYSEFKHCWDTFVDHQGCPFQPWDGLDEHSQDLSGRLRAILQNQENSGGSSGGSSGSETPGTSESATPESSGGSSGGSDKKYSIGLAIGTNSVGWAVITDEYKVPSKKFKVLGNTDRHSIKKNLIGALLFDSGETAEATRLKRTARRRYTRRKNRICYLQEIFSNEMAKVDDSFFHRLEESFLVEEDKKHERHPIFGNIVDEVAYHEKYPTIYHLRKKLVDSTDKADLRLIYLALAHMIKFRGHFLIEGDLNPDNSDVDKLFIQLVQTYNQLFEENPINASGVDAKAILSARLSKSRRLENLIAQLPGEKKNGLFGNLIALSLGLTPNFKSNFDLAEDAKLQLSKDTYDDDLDNLLAQIGDQYADLFLAAKNLSDAILLSDILRVNTEITKAPLSASMIKRYDEHHQDLTLLKALVRQQLPEKYKEIFFDQSKNGYAGYIDGGASQEEFYKFIKPILEKMDGTEELLVKLNREDLLRKQRTFDNGSIPHQIHLGELHAILRRQEDFYPFLKDNREKIEKILTFRIPYYVGPLARGNSRFAWMTRKSEETITPWNFEEVVDKGASAQSFIERMTNFDKNLPNEKVLPKHSLLYEYFTVYNELTKVKYVTEGMRKPAFLSGEQKKAIVDLLFKTNRKVTVKQLKEDYFKKIECFDSVEISGVEDRFNASLGTYHDLLKIIKDKDFLDNEENEDILEDIVLTLTLFEDREMIEERLKTYAHLFDDKVMKQLKRRRYTGWGRLSRKLINGIRDKQSGKTILDFLKSDGFANRNFMQLIHDDSLTFKEDIQKAQVSGQGDSLHEHIANLAGSPAIKKGILQTVKVVDELVKVMGRHKPENIVIEMARENQTTQKGQKNSRERMKRIEEGIKELGSQILKEHPVENTQLQNEKLYLYYLQNGRDMYVDQELDINRLSDYDVDHIVPQSFLKDDSIDNKVLTRSDKNRGKSDNVPSEEVVKKMKNYWRQLLNAKLITQRKFDNLTKAERGGLSELDKAGFIKRQLVETRQITKHVAQILDSRMNTKYDENDKLIREVKVITLKSKLVSDFRKDFQFYKVREINNYHHAHDAYLNAVVGTALIKKYPKLESEFVYGDYKVYDVRKMIAKSEQEIGKATAKYFFYSNIMNFFKTEITLANGEIRKRPLIETNGETGEIVWDKGRDFATVRKVLSMPQVNIVKKTEVQTGGFSKESILPKRNSDKLIARKKDWDPKKYGGFDSPTVAYSVLVVAKVEKGKSKKLKSVKELLGITIMERSSFEKNPIDFLEAKGYKEVKKDLIIKLPKYSLFELENGRKRMLASAGELQKGNELALPSKYVNFLYLASHYEKLKGSPEDNEQKQLFVEQHKHYLDEIIEQISEFSKRVILADANLDKVLSAYNKHRDKPIREQAENIIHLFTLTNLGAPAAFKYFDTTIDRKRYTSTKEVLDATLIHQSITGLYETRIDLSQLGGDSGGSGGSGGSTNLSDIIEKETGKQLVIQESILMLPEEVEEVIGNKPESDILVHTAYDESTDENVMLLTSDAPEYKPWALVIQDSNGENKIKMLSGGSGGSGGSTNLSDIIEKETGKQLVIQESILMLPEEVEEVIGNKPESDILVHTAYDESTDENVMLLTSDAPEYKPWALVIQDSNGENKIKMLSGGSKRTADGSEFEPKKKRKV

SEQ ID NO: 16 - protein, 1835 aa, Artificial sequence
  Synthetic polypeptide
MKRTADGSEFESPKKKRKVWNNLPKYYILLHIMLGEILRHSMDPATFTFNFNNEPWVRGRHETYLCYEVERMHNDTWVLLAQRRGFLCNQAKHKHGFLEGRHAELCFLDVIPFWKLDLDQDYRVTCFTSWSPCFSCAQEMAKFISKNKHVSLCIFTARIYDDKGRCKEGLRTLAEAGAKISIMTYSEFKHCWDTFVDHQGCPFQPWDGLDEHSQDLSGRLRAILQNQENSGGSSGGSSGSETPGTSESATPESSGGSSGGSDKKYSIGLAIGTNSVGWAVITDEYKVPSKKFKVLGNTDRHSIKKNLIGALLFDSGETAEATRLKRTARRRYTRRKNRICYLQEIFSNEMAKVDDSFFHRLEESFLVEEDKKHERHPIFGNIVDEVAYHEKYPTIYHLRKKLVDSTDKADLRLIYLALAHMIKFRGHFLIEGDLNPDNSDVDKLFIQLVQTYNQLFEENPINASGVDAKAILSARLSKSRRLENLIAQLPGEKKNGLFGNLIALSLGLTPNFKSNFDLAEDAKLQLSKDTYDDDLDNLLAQIGDQYADLFLAAKNLSDAILLSDILRVNTEITKAPLSASMIKRYDEHHQDLTLLKALVRQQLPEKYKEIFFDQSKNGYAGYIDGGASQEEFYKFIKPILEKMDGTEELLVKLNREDLLRKQRTFDNGSIPHQIHLGELHAILRRQEDFYPFLKDNREKIEKILTFRIPYYVGPLARGNSRFAWMTRKSEETITPWNFEEVVDKGASAQSFIERMTNFDKNLPNEKVLPKHSLLYEYFTVYNELTKVKYVTEGMRKPAFLSGEQKKAIVDLLFKTNRKVTVKQLKEDYFKKIECFDSVEISGVEDRFNASLGTYHDLLKIIKDKDFLDNEENEDILEDIVLTLTLFEDREMIEERLKTYAHLFDDKVMKQLKRRRYTGWGRLSRKLINGIRDKQSGKTILDFLKSDGFANRNFMQLIHDDSLTFKEDIQKAQVSGQGDSLHEHIANLAGSPAIKKGILQTVKVVDELVKVMGRHKPENIVIEMARENQTTQKGQKNSRERMKRIEEGIKELGSQILKEHPVENTQLQNEKLYLYYLQNGRDMYVDQELDINRLSDYDVDHIVPQSFLKDDSIDNKVLTRSDKNRGKSDNVPSEEVVKKMKNYWRQLLNAKLITQRKFDNLTKAERGGLSELDKAGFIKRQLVETRQITKHVAQILDSRMNTKYDENDKLIREVKVITLKSKLVSDFRKDFQFYKVREINNYHHAHDAYLNAVVGTALIKKYPKLESEFVYGDYKVYDVRKMIAKSEQEIGKATAKYFFYSNIMNFFKTEITLANGEIRKRPLIETNGETGEIVWDKGRDFATVRKVLSMPQVNIVKKTEVQTGGFSKESILPKRNSDKLIARKKDWDPKKYGGFDSPTVAYSVLVVAKVEKGKSKKLKSVKELLGITIMERSSFEKNPIDFLEAKGYKEVKKDLIIKLPKYSLFELENGRKRMLASAGELQKGNELALPSKYVNFLYLASHYEKLKGSPEDNEQKQLFVEQHKHYLDEIIEQISEFSKRVILADANLDKVLSAYNKHRDKPIREQAENIIHLFTLTNLGAPAAFKYFDTTIDRKRYTSTKEVLDATLIHQSITGLYETRIDLSQLGGDSGGSGGSGGSTNLSDIIEKETGKQLVIQESILMLPEEVEEVIGNKPESDILVHTAYDESTDENVMLLTSDAPEYKPWALVIQDSNGENKIKMLSGGSGGSGGSTNLSDIIEKETGKQLVIQESILMLPEEVEEVIGNKPESDILVHTAYDESTDENVMLLTSDAPEYKPWALVIQDSNGENKIKMLSGGSKRTADGSEFEPKKKRKV

SEQ ID NO: 17 - protein, 1812 aa, Artificial sequence
  Synthetic polypeptide
MKRTADGSEFESPKKKRKVDPATFTFNFNNEPWVRGRHETYLCYEVERMHNDTWVLLAQRRGFLCNQAKNLLCGFYGRHAELCFLDVIPFWKLDLDQDYRVTCFTSWSPCFSCAQEMAKFISKNKHVSLCIFTARIYDDKGRCKEGLRTLAEAGAKISIMTYSEFKHCWDTFVDHQGCPFQPWDGLDEHSQDLSGRLRAILQNQENSGGSSGGSSGSETPGTSESATPESSGGSSGGSDKKYSIGLAIGTNSVGWAVITDEYKVPSKKFKVLGNTDRHSIKKNLIGALLFDSGETAEATRLKRTARRRYTRRKNRICYLQEIFSNEMAKVDDSFFHRLEESFLVEEDKKHERHPIFGNIVDEVAYHEKYPTIYHLRKKLVDSTDKADLRLIYLALAHMIKFRGHFLIEGDLNPDNSDVDKLFIQLVQTYNQLFEENPINASGVDAKAILSARLSKSRRLENLIAQLPGEKKNGLFGNLIALSLGLTPNFKSNFDLAEDAKLQLSKDTYDDDLDNLLAQIGDQYADLFLAAKNLSDAILLSDILRVNTEITKAPLSASMIKRYDEHHQDLTLLKALVRQQLPEKYKEIFFDQSKNGYAGYIDGGASQEEFYKFIKPILEKMDGTEELLVKLNREDLLRKQRTFDNGSIPHQIHLGELHAILRRQEDFYPFLKDNREKIEKILTFRIPYYVGPLARGNSRFAWMTRKSEETITPWNFEEVVDKGASAQSFIERMTNFDKNLPNEKVLPKHSLLYEYFTVYNELTKVKYVTEGMRKPAFLSGEQKKAIVDLLFKTNRKVTVKQLKEDYFKKIECFDSVEISGVEDRFNASLGTYHDLLKIIKDKDFLDNEENEDILEDIVLTLTLFEDREMIEERLKTYAHLFDDKVMKQLKRRRYTGWGRLSRKLINGIRDKQSGKTILDFLKSDGFANRNFMQLIHDDSLTFKEDIQKAQVSGQGDSLHEHIANLAGSPAIKKGILQTVKVVDELVKVMGRHKPENIVIEMARENQTTQKGQKNSRERMKRIEEGIKELGSQILKEHPVENTQLQNEKLYLYYLQNGRDMYVDQELDINRLSDYDVDHIVPQSFLKDDSIDNKVLTRSDKNRGKSDNVPSEEVVKKMKNYWRQLLNAKLITQRKFDNLTKAERGGLSELDKAGFIKRQLVETRQITKHVAQILDSRMNTKYDENDKLIREVKVITLKSKLVSDFRKDFQFYKVREINNYHHAHDAYLNAVVGTALIKKYPKLESEFVYGDYKVYDVRKMIAKSEQEIGKATAKYFFYSNIMNFFKTEITLANGEIRKRPLIETNGETGEIVWDKGRDFATVRKVLSMPQVNIVKKTEVQTGGFSKESILPKRNSDKLIARKKDWDPKKYGGFDSPTVAYSVLVVAKVEKGKSKKLKSVKELLGITIMERSSFEKNPIDFLEAKGYKEVKKDLIIKLPKYSLFELENGRKRMLASAGELQKGNELALPSKYVNFLYLASHYEKLKGSPEDNEQKQLFVEQHKHYLDEIIEQISEFSKRVILADANLDKVLSAYNKHRDKPIREQAENIIHLFTLTNLGAPAAFKYFDTTIDRKRYTSTKEVLDATLIHQSITGLYETRIDLSQLGGDSGGSGGSGGSTNLSDIIEKETGKQLVIQESILMLPEEVEEVIGNKPESDILVHTAYDESTDENVMLLTSDAPEYKPWALVIQDSNGENKIKMLSGGSGGSGGSTNLSDIIEKETGKQLVIQESILMLPEEVEEVIGNKPESDILVHTAYDESTDENVMLLTSDAPEYKPWALVIQDSNGENKIKMLSGGSKRTADGSEFEPKKKRKV

SEQ ID NO: 18 - protein, 1812 aa, Artificial sequence
  Synthetic polypeptide
MKRTADGSEFESPKKKRKVDPATFTFNFNNEPWVRGRHETYLCYEVERMHNDTWVKLAQRRGFLANQAKHKHGFLEGRHAELCFLDVIPFWKLDLDQDYRVTCFTSWSPCFSCAQEMAKFISKNKHVSLCIKTARIYDDKGRAKEGLRTLAEAGAKISIMTYSEFKHCWDTFVDHQGAPFQPWDGLDEHSQDLSGRLRAILQNQENSGGSSGGSSGSETPGTSESATPESSGGSSGGSDKKYSIGLAIGTNSVGWAVITDEYKVPSKKFKVLGNTDRHSIKKNLIGALLFDSGETAEATRLKRTARRRYTRRKNRICYLQEIFSNEMAKVDDSFFHRLEESFLVEEDKKHERHPIFGNIVDEVAYHEKYPTIYHLRKKLVDSTDKADLRLIYLALAHMIKFRGHFLIEGDLNPDNSDVDKLFIQLVQTYNQLFEENPINASGVDAKAILSARLSKSRRLENLIAQLPGEKKNGLFGNLIALSLGLTPNFKSNFDLAEDAKLQLSKDTYDDDLDNLLAQIGDQYADLFLAAKNLSDAILLSDILRVNTEITKAPLSASMIKRYDEHHQDLTLLKALVRQQLPEKYKEIFFDQSKNGYAGYIDGGASQEEFYKFIKPILEKMDGTEELLVKLNREDLLRKQRTFDNGSIPHQIHLGELHAILRRQEDFYPFLKDNREKIEKILTFRIPYYVGPLARGNSRFAWMTRKSEETITPWNFEEVVDKGASAQSFIERMTNFDKNLPNEKVLPKHSLLYEYFTVYNELTKVKYVTEGMRKPAFLSGEQKKAIVDLLFKTNRKVTVKQLKEDYFKKIECFDSVEISGVEDRFNASLGTYHDLLKIIKDKDFLDNEENEDILEDIVLTLTLFEDREMIEERLKTYAHLFDDKVMKQLKRRRYTGWGRLSRKLINGIRDKQSGKTILDFLKSDGFANRNFMQLIHDDSLTFKEDIQKAQVSGQGDSLHEHIANLAGSPAIKKGILQTVKVVDELVKVMGRHKPENIVIEMARENQTTQKGQKNSRERMKRIEEGIKELGSQILKEHPVENTQLQNEKLYLYYLQNGRDMYVDQELDINRLSDYDVDHIVPQSFLKDDSIDNKVLTRSDKNRGKSDNVPSEEVVKKMKNYWRQLLNAKLITQRKFDNLTKAERGGLSELDKAGFIKRQLVETRQITKHVAQILDSRMNTKYDENDKLIREVKVITLKSKLVSDFRKDFQFYKVREINNYHHAHDAYLNAVVGTALIKKYPKLESEFVYGDYKVYDVRKMIAKSEQEIGKATAKYFFYSNIMNFFKTEITLANGEIRKRPLIETNGETGEIVWDKGRDFATVRKVLSMPQVNIVKKTEVQTGGFSKESILPKRNSDKLIARKKDWDPKKYGGFDSPTVAYSVLVVAKVEKGKSKKLKSVKELLGITIMERSSFEKNPIDFLEAKGYKEVKKDLIIKLPKYSLFELENGRKRMLASAGELQKGNELALPSKYVNFLYLASHYEKLKGSPEDNEQKQLFVEQHKHYLDEIIEQISEFSKRVILADANLDKVLSAYNKHRDKPIREQAENIIHLFTLTNLGAPAAFKYFDTTIDRKRYTSTKEVLDATLIHQSITGLYETRIDLSQLGGDSGGSGGSGGSTNLSDIIEKETGKQLVIQESILMLPEEVEEVIGNKPESDILVHTAYDESTDENVMLLTSDAPEYKPWALVIQDSNGENKIKMLSGGSGGSGGSTNLSDIIEKETGKQLVIQESILMLPEEVEEVIGNKPESDILVHTAYDESTDENVMLLTSDAPEYKPWALVIQDSNGENKIKMLSGGSKRTADGSEFEPKKKRKV

SEQ ID NO: 19 - protein, 1812 aa, Artificial sequence
  Synthetic polypeptide
MKRTADGSEFESPKKKRKVDPATFTFNFNNEPWVRGRHETYLCYEVERMHNDTWVKLAQRRGFLANQAKNLLCGFYGRHAELCFLDVIPFWKLDLDQDYRVTCFTSWSPCFSCAQEMAKFISKNKHVSLCIKTARIYDDKGRAKEGLRTLAEAGAKISIMTYSEFKHCWDTFVDHQGAPFQPWDGLDEHSQDLSGRLRAILQNQENSGGSSGGSSGSETPGTSESATPESSGGSSGGSDKKYSIGLAIGTNSVGWAVITDEYKVPSKKFKVLGNTDRHSIKKNLIGALLFDSGETAEATRLKRTARRRYTRRKNRICYLQEIFSNEMAKVDDSFFHRLEESFLVEEDKKHERHPIFGNIVDEVAYHEKYPTIYHLRKKLVDSTDKADLRLIYLALAHMIKFRGHFLIEGDLNPDNSDVDKLFIQLVQTYNQLFEENPINASGVDAKAILSARLSKSRRLENLIAQLPGEKKNGLFGNLIALSLGLTPNFKSNFDLAEDAKLQLSKDTYDDDLDNLLAQIGDQYADLFLAAKNLSDAILLSDILRVNTEITKAPLSASMIKRYDEHHQDLTLLKALVRQQLPEKYKEIFFDQSKNGYAGYIDGGASQEEFYKFIKPILEKMDGTEELLVKLNREDLLRKQRTFDNGSIPHQIHLGELHAILRRQEDFYPFLKDNREKIEKILTFRIPYYVGPLARGNSRFAWMTRKSEETITPWNFEEVVDKGASAQSFIERMTNFDKNLPNEKVLPKHSLLYEYFTVYNELTKVKYVTEGMRKPAFLSGEQKKAIVDLLFKTNRKVTVKQLKEDYFKKIECFDSVEISGVEDRFNASLGTYHDLLKIIKDKDFLDNEENEDILEDIVLTLTLFEDREMIEERLKTYAHLFDDKVMKQLKRRRYTGWGRLSRKLINGIRDKQSGKTILDFLKSDGFANRNFMQLIHDDSLTFKEDIQKAQVSGQGDSLHEHIANLAGSPAIKKGILQTVKVVDELVKVMGRHKPENIVIEMARENQTTQKGQKNSRERMKRIEEGIKELGSQILKEHPVENTQLQNEKLYLYYLQNGRDMYVDQELDINRLSDYDVDHIVPQSFLKDDSIDNKVLTRSDKNRGKSDNVPSEEVVKKMKNYWRQLLNAKLITQRKFDNLTKAERGGLSELDKAGFIKRQLVETRQITKHVAQILDSRMNTKYDENDKLIREVKVITLKSKLVSDFRKDFQFYKVREINNYHHAHDAYLNAVVGTALIKKYPKLESEFVYGDYKVYDVRKMIAKSEQEIGKATAKYFFYSNIMNFFKTEITLANGEIRKRPLIETNGETGEIVWDKGRDFATVRKVLSMPQVNIVKKTEVQTGGFSKESILPKRNSDKLIARKKDWDPKKYGGFDSPTVAYSVLVVAKVEKGKSKKLKSVKELLGITIMERSSFEKNPIDFLEAKGYKEVKKDLIIKLPKYSLFELENGRKRMLASAGELQKGNELALPSKYVNFLYLASHYEKLKGSPEDNEQKQLFVEQHKHYLDEIIEQISEFSKRVILADANLDKVLSAYNKHRDKPIREQAENIIHLFTLTNLGAPAAFKYFDTTIDRKRYTSTKEVLDATLIHQSITGLYETRIDLSQLGGDSGGSGGSGGSTNLSDIIEKETGKQLVIQESILMLPEEVEEVIGNKPESDILVHTAYDESTDENVMLLTSDAPEYKPWALVIQDSNGENKIKMLSGGSGGSGGSTNLSDIIEKETGKQLVIQESILMLPEEVEEVIGNKPESDILVHTAYDESTDENVMLLTSDAPEYKPWALVIQDSNGENKIKMLSGGSKRTADGSEFEPKKKRKV

SEQ ID NO: 20 - protein, 1812 aa, Artificial sequence
  Synthetic polypeptide
MKRTADGSEFESPKKKRKVDPATFTFNFNNEPWVRGRHETYLCYEVERMHNDTWVLLAQRRGFLCNQAKNLLCGFYGRHAELCFLDVIPFWKLDLDQDYRVTCFTSWSPCFSCAQEMAKFISKNKHVSLCIFTARIYDDKGRCAEGLRTLAEAGAKISIMTYSEFKHCWDTFVDHQGCPFQPWDGLDEHSQDLSGRLRAILQNQENSGGSSGGSSGSETPGTSESATPESSGGSSGGSDKKYSIGLAIGTNSVGWAVITDEYKVPSKKFKVLGNTDRHSIKKNLIGALLFDSGETAEATRLKRTARRRYTRRKNRICYLQEIFSNEMAKVDDSFFHRLEESFLVEEDKKHERHPIFGNIVDEVAYHEKYPTIYHLRKKLVDSTDKADLRLIYLALAHMIKFRGHFLIEGDLNPDNSDVDKLFIQLVQTYNQLFEENPINASGVDAKAILSARLSKSRRLENLIAQLPGEKKNGLFGNLIALSLGLTPNFKSNFDLAEDAKLQLSKDTYDDDLDNLLAQIGDQYADLFLAAKNLSDAILLSDILRVNTEITKAPLSASMIKRYDEHHQDLTLLKALVRQQLPEKYKEIFFDQSKNGYAGYIDGGASQEEFYKFIKPILEKMDGTEELLVKLNREDLLRKQRTFDNGSIPHQIHLGELHAILRRQEDFYPFLKDNREKIEKILTFRIPYYVGPLARGNSRFAWMTRKSEETITPWNFEEVVDKGASAQSFIERMTNFDKNLPNEKVLPKHSLLYEYFTVYNELTKVKYVTEGMRKPAFLSGEQKKAIVDLLFKTNRKVTVKQLKEDYFKKIECFDSVEISGVEDRFNASLGTYHDLLKIIKDKDFLDNEENEDILEDIVLTLTLFEDREMIEERLKTYAHLFDDKVMKQLKRRRYTGWGRLSRKLINGIRDKQSGKTILDFLKSDGFANRNFMQLIHDDSLTFKEDIQKAQVSGQGDSLHEHIANLAGSPAIKKGILQTVKVVDELVKVMGRHKPENIVIEMARENQTTQKGQKNSRERMKRIEEGIKELGSQILKEHPVENTQLQNEKLYLYYLQNGRDMYVDQELDINRLSDYDVDHIVPQSFLKDDSIDNKVLTRSDKNRGKSDNVPSEEVVKKMKNYWRQLLNAKLITQRKFDNLTKAERGGLSELDKAGFIKRQLVETRQITKHVAQILDSRMNTKYDENDKLIREVKVITLKSKLVSDFRKDFQFYKVREINNYHHAHDAYLNAVVGTALIKKYPKLESEFVYGDYKVYDVRKMIAKSEQEIGKATAKYFFYSNIMNFFKTEITLANGEIRKRPLIETNGETGEIVWDKGRDFATVRKVLSMPQVNIVKKTEVQTGGFSKESILPKRNSDKLIARKKDWDPKKYGGFDSPTVAYSVLVVAKVEKGKSKKLKSVKELLGITIMERSSFEKNPIDFLEAKGYKEVKKDLIIKLPKYSLFELENGRKRMLASAGELQKGNELALPSKYVNFLYLASHYEKLKGSPEDNEQKQLFVEQHKHYLDEIIEQISEFSKRVILADANLDKVLSAYNKHRDKPIREQAENIIHLFTLTNLGAPAAFKYFDTTIDRKRYTSTKEVLDATLIHQSITGLYETRIDLSQLGGDSGGSGGSGGSTNLSDIIEKETGKQLVIQESILMLPEEVEEVIGNKPESDILVHTAYDESTDENVMLLTSDAPEYKPWALVIQDSNGENKIKMLSGGSGGSGGSTNLSDIIEKETGKQLVIQESILMLPEEVEEVIGNKPESDILVHTAYDESTDENVMLLTSDAPEYKPWALVIQDSNGENKIKMLSGGSKRTADGSEFEPKKKRKV

SEQ ID NO: 21 - protein, 1812 aa, Artificial sequence
  Synthetic polypeptide
MKRTADGSEFESPKKKRKVDPATFTFNFNNEPWVRGRHETYLCYEVERMHNDTWVLLAQRRGFLCNQAKNLLCGFYGRHAELCFLDVIPFWKLDLDQDYRVTCFTSWSPCFSCAQEMAKFISKNKHVSLCIFTARIYDDKGLCKEGLRTLAEAGAKISIMTYSEFKHCWDTFVDHQGCPFQPWDGLDEHSQDLSGRLRAILQNQENSGGSSGGSSGSETPGTSESATPESSGGSSGGSDKKYSIGLAIGTNSVGWAVITDEYKVPSKKFKVLGNTDRHSIKKNLIGALLFDSGETAEATRLKRTARRRYTRRKNRICYLQEIFSNEMAKVDDSFFHRLEESFLVEEDKKHERHPIFGNIVDEVAYHEKYPTIYHLRKKLVDSTDKADLRLIYLALAHMIKFRGHFLIEGDLNPDNSDVDKLFIQLVQTYNQLFEENPINASGVDAKAILSARLSKSRRLENLIAQLPGEKKNGLFGNLIALSLGLTPNFKSNFDLAEDAKLQLSKDTYDDDLDNLLAQIGDQYADLFLAAKNLSDAILLSDILRVNTEITKAPLSASMIKRYDEHHQDLTLLKALVRQQLPEKYKEIFFDQSKNGYAGYIDGGASQEEFYKFIKPILEKMDGTEELLVKLNREDLLRKQRTFDNGSIPHQIHLGELHAILRRQEDFYPFLKDNREKIEKILTFRIPYYVGPLARGNSRFAWMTRKSEETITPWNFEEVVDKGASAQSFIERMTNFDKNLPNEKVLPKHSLLYEYFTVYNELTKVKYVTEGMRKPAFLSGEQKKAIVDLLFKTNRKVTVKQLKEDYFKKIECFDSVEISGVEDRFNASLGTYHDLLKIIKDKDFLDNEENEDILEDIVLTLTLFEDREMIEERLKTYAHLFDDKVMKQLKRRRYTGWGRLSRKLINGIRDKQSGKTILDFLKSDGFANRNFMQLIHDDSLTFKEDIQKAQVSGQGDSLHEHIANLAGSPAIKKGILQTVKVVDELVKVMGRHKPENIVIEMARENQTTQKGQKNSRERMKRIEEGIKELGSQILKEHPVENTQLQNEKLYLYYLQNGRDMYVDQELDINRLSDYDVDHIVPQSFLKDDSIDNKVLTRSDKNRGKSDNVPSEEVVKKMKNYWRQLLNAKLITQRKFDNLTKAERGGLSELDKAGFIKRQLVETRQITKHVAQILDSRMNTKYDENDKLIREVKVITLKSKLVSDFRKDFQFYKVREINNYHHAHDAYLNAVVGTALIKKYPKLESEFVYGDYKVYDVRKMIAKSEQEIGKATAKYFFYSNIMNFFKTEITLANGEIRKRPLIETNGETGEIVWDKGRDFATVRKVLSMPQVNIVKKTEVQTGGFSKESILPKRNSDKLIARKKDWDPKKYGGFDSPTVAYSVLVVAKVEKGKSKKLKSVKELLGITIMERSSFEKNPIDFLEAKGYKEVKKDLIIKLPKYSLFELENGRKRMLASAGELQKGNELALPSKYVNFLYLASHYEKLKGSPEDNEQKQLFVEQHKHYLDEIIEQISEFSKRVILADANLDKVLSAYNKHRDKPIREQAENIIHLFTLTNLGAPAAFKYFDTTIDRKRYTSTKEVLDATLIHQSITGLYETRIDLSQLGGDSGGSGGSGGSTNLSDIIEKETGKQLVIQESILMLPEEVEEVIGNKPESDILVHTAYDESTDENVMLLTSDAPEYKPWALVIQDSNGENKIKMLSGGSGGSGGSTNLSDIIEKETGKQLVIQESILMLPEEVEEVIGNKPESDILVHTAYDESTDENVMLLTSDAPEYKPWALVIQDSNGENKIKMLSGGSKRTADGSEFEPKKKRKV

SEQ ID NO: 22 - protein, 1812 aa, Artificial sequence
  Synthetic polypeptide
MKRTADGSEFESPKKKRKVDPATFTFNFNNEPWVRGRHETYLCYEVERMHNDTWVLLAQRRGFLCNQAKNLLCGFYGRHAELCFLDVIPFWKLDLDQDYRVTCFTSWSPCFSCAQEMAKFISKNKHVSLCIFAARIYDDKGRCKEGLRTLAEAGAKISIMTYSEFKHCWDTFVDHQGCPFQPWDGLDEHSQDLSGRLRAILQNQENSGGSSGGSSGSETPGTSESATPESSGGSSGGSDKKYSIGLAIGTNSVGWAVITDEYKVPSKKFKVLGNTDRHSIKKNLIGALLFDSGETAEATRLKRTARRRYTRRKNRICYLQEIFSNEMAKVDDSFFHRLEESFLVEEDKKHERHPIFGNIVDEVAYHEKYPTIYHLRKKLVDSTDKADLRLIYLALAHMIKFRGHFLIEGDLNPDNSDVDKLFIQLVQTYNQLFEENPINASGVDAKAILSARLSKSRRLENLIAQLPGEKKNGLFGNLIALSLGLTPNFKSNFDLAEDAKLQLSKDTYDDDLDNLLAQIGDQYADLFLAAKNLSDAILLSDILRVNTEITKAPLSASMIKRYDEHHQDLTLLKALVRQQLPEKYKEIFFDQSKNGYAGYIDGGASQEEFYKFIKPILEKMDGTEELLVKLNREDLLRKQRTFDNGSIPHQIHLGELHAILRRQEDFYPFLKDNREKIEKILTFRIPYYVGPLARGNSRFAWMTRKSEETITPWNFEEVVDKGASAQSFIERMTNFDKNLPNEKVLPKHSLLYEYFTVYNELTKVKYVTEGMRKPAFLSGEQKKAIVDLLFKTNRKVTVKQLKEDYFKKIECFDSVEISGVEDRFNASLGTYHDLLKIIKDKDFLDNEENEDILEDIVLTLTLFEDREMIEERLKTYAHLFDDKVMKQLKRRRYTGWGRLSRKLINGIRDKQSGKTILDFLKSDGFANRNFMQLIHDDSLTFKEDIQKAQVSGQGDSLHEHIANLAGSPAIKKGILQTVKVVDELVKVMGRHKPENIVIEMARENQTTQKGQKNSRERMKRIEEGIKELGSQILKEHPVENTQLQNEKLYLYYLQNGRDMYVDQELDINRLSDYDVDHIVPQSFLKDDSIDNKVLTRSDKNRGKSDNVPSEEVVKKMKNYWRQLLNAKLITQRKFDNLTKAERGGLSELDKAGFIKRQLVETRQITKHVAQILDSRMNTKYDENDKLIREVKVITLKSKLVSDFRKDFQFYKVREINNYHHAHDAYLNAVVGTALIKKYPKLESEFVYGDYKVYDVRKMIAKSEQEIGKATAKYFFYSNIMNFFKTEITLANGEIRKRPLIETNGETGEIVWDKGRDFATVRKVLSMPQVNIVKKTEVQTGGFSKESILPKRNSDKLIARKKDWDPKKYGGFDSPTVAYSVLVVAKVEKGKSKKLKSVKELLGITIMERSSFEKNPIDFLEAKGYKEVKKDLIIKLPKYSLFELENGRKRMLASAGELQKGNELALPSKYVNFLYLASHYEKLKGSPEDNEQKQLFVEQHKHYLDEIIEQISEFSKRVILADANLDKVLSAYNKHRDKPIREQAENIIHLFTLTNLGAPAAFKYFDTTIDRKRYTSTKEVLDATLIHQSITGLYETRIDLSQLGGDSGGSGGSGGSTNLSDIIEKETGKQLVIQESILMLPEEVEEVIGNKPESDILVHTAYDESTDENVMLLTSDAPEYKPWALVIQDSNGENKIKMLSGGSGGSGGSTNLSDIIEKETGKQLVIQESILMLPEEVEEVIGNKPESDILVHTAYDESTDENVMLLTSDAPEYKPWALVIQDSNGENKIKMLSGGSKRTADGSEFEPKKKRKV

SEQ ID NO: 23 - protein, 1812 aa, Artificial sequence
  Synthetic polypeptide
MKRTADGSEFESPKKKRKVDPATFTFNFNNEPWVRGRHKTYLCYEVERMHNDTWVLLAQRRGFLCNQAKNLLCGFYGRHAELCFLDVIPFWKLDLDQDYRVTCFTSWSPCFSCAQEMAKFISKNKHVSLCIFTARIYDDKGRCKEGLRTLAEAGAKISIMTYSEFKHCWDTFVDHQGCPFQPWDGLDEHSQDLSGRLRAILQNQENSGGSSGGSSGSETPGTSESATPESSGGSSGGSDKKYSIGLAIGTNSVGWAVITDEYKVPSKKFKVLGNTDRHSIKKNLIGALLFDSGETAEATRLKRTARRRYTRRKNRICYLQEIFSNEMAKVDDSFFHRLEESFLVEEDKKHERHPIFGNIVDEVAYHEKYPTIYHLRKKLVDSTDKADLRLIYLALAHMIKFRGHFLIEGDLNPDNSDVDKLFIQLVQTYNQLFEENPINASGVDAKAILSARLSKSRRLENLIAQLPGEKKNGLFGNLIALSLGLTPNFKSNFDLAEDAKLQLSKDTYDDDLDNLLAQIGDQYADLFLAAKNLSDAILLSDILRVNTEITKAPLSASMIKRYDEHHQDLTLLKALVRQQLPEKYKEIFFDQSKNGYAGYIDGGASQEEFYKFIKPILEKMDGTEELLVKLNREDLLRKQRTFDNGSIPHQIHLGELHAILRRQEDFYPFLKDNREKIEKILTFRIPYYVGPLARGNSRFAWMTRKSEETITPWNFEEVVDKGASAQSFIERMTNFDKNLPNEKVLPKHSLLYEYFTVYNELTKVKYVTEGMRKPAFLSGEQKKAIVDLLFKTNRKVTVKQLKEDYFKKIECFDSVEISGVEDRFNASLGTYHDLLKIIKDKDFLDNEENEDILEDIVLTLTLFEDREMIEERLKTYAHLFDDKVMKQLKRRRYTGWGRLSRKLINGIRDKQSGKTILDFLKSDGFANRNFMQLIHDDSLTFKEDIQKAQVSGQGDSLHEHIANLAGSPAIKKGILQTVKVVDELVKVMGRHKPENIVIEMARENQTTQKGQKNSRERMKRIEEGIKELGSQILKEHPVENTQLQNEKLYLYYLQNGRDMYVDQELDINRLSDYDVDHIVPQSFLKDDSIDNKVLTRSDKNRGKSDNVPSEEVVKKMKNYWRQLLNAKLITQRKFDNLTKAERGGLSELDKAGFIKRQLVETRQITKHVAQILDSRMNTKYDENDKLIREVKVITLKSKLVSDFRKDFQFYKVREINNYHHAHDAYLNAVVGTALIKKYPKLESEFVYGDYKVYDVRKMIAKSEQEIGKATAKYFFYSNIMNFFKTEITLANGEIRKRPLIETNGETGEIVWDKGRDFATVRKVLSMPQVNIVKKTEVQTGGFSKESILPKRNSDKLIARKKDWDPKKYGGFDSPTVAYSVLVVAKVEKGKSKKLKSVKELLGITIMERSSFEKNPIDFLEAKGYKEVKKDLIIKLPKYSLFELENGRKRMLASAGELQKGNELALPSKYVNFLYLASHYEKLKGSPEDNEQKQLFVEQHKHYLDEIIEQISEFSKRVILADANLDKVLSAYNKHRDKPIREQAENIIHLFTLTNLGAPAAFKYFDTTIDRKRYTSTKEVLDATLIHQSITGLYETRIDLSQLGGDSGGSGGSGGSTNLSDIIEKETGKQLVIQESILMLPEEVEEVIGNKPESDILVHTAYDESTDENVMLLTSDAPEYKPWALVIQDSNGENKIKMLSGGSGGSGGSTNLSDIIEKETGKQLVIQESILMLPEEVEEVIGNKPESDILVHTAYDESTDENVMLLTSDAPEYKPWALVIQDSNGENKIKMLSGGSKRTADGSEFEPKKKRKV

SEQ ID NO: 24 - protein, 1812 aa, Artificial sequence
  Synthetic polypeptide
MKRTADGSEFESPKKKRKVDPATFTFNFNNEPWVRGRHETYLCYEVERMHNDTWVLLAQRRGFLCNQAKNLLCGFYGRHAELCFLDVIPFWKLDLDQDYRVTCFTSWSPCFSCAQEMAKFISKNKHVSLCIFAARIYDDKGLCKEGLRTLAEAGAKISIMTYSEFKHCWDTFVDHQGCPFQPWDGLDEHSQDLSGRLRAILQNQENSGGSSGGSSGSETPGTSESATPESSGGSSGGSDKKYSIGLAIGTNSVGWAVITDEYKVPSKKFKVLGNTDRHSIKKNLIGALLFDSGETAEATRLKRTARRRYTRRKNRICYLQEIFSNEMAKVDDSFFHRLEESFLVEEDKKHERHPIFGNIVDEVAYHEKYPTIYHLRKKLVDSTDKADLRLIYLALAHMIKFRGHFLIEGDLNPDNSDVDKLFIQLVQTYNQLFEENPINASGVDAKAILSARLSKSRRLENLIAQLPGEKKNGLFGNLIALSLGLTPNFKSNFDLAEDAKLQLSKDTYDDDLDNLLAQIGDQYADLFLAAKNLSDAILLSDILRVNTEITKAPLSASMIKRYDEHHQDLTLLKALVRQQLPEKYKEIFFDQSKNGYAGYIDGGASQEEFYKFIKPILEKMDGTEELLVKLNREDLLRKQRTFDNGSIPHQIHLGELHAILRRQEDFYPFLKDNREKIEKILTFRIPYYVGPLARGNSRFAWMTRKSEETITPWNFEEVVDKGASAQSFIERMTNFDKNLPNEKVLPKHSLLYEYFTVYNELTKVKYVTEGMRKPAFLSGEQKKAIVDLLFKTNRKVTVKQLKEDYFKKIECFDSVEISGVEDRFNASLGTYHDLLKIIKDKDFLDNEENEDILEDIVLTLTLFEDREMIEERLKTYAHLFDDKVMKQLKRRRYTGWGRLSRKLINGIRDKQSGKTILDFLKSDGFANRNFMQLIHDDSLTFKEDIQKAQVSGQGDSLHEHIANLAGSPAIKKGILQTVKVVDELVKVMGRHKPENIVIEMARENQTTQKGQKNSRERMKRIEEGIKELGSQILKEHPVENTQLQNEKLYLYYLQNGRDMYVDQELDINRLSDYDVDHIVPQSFLKDDSIDNKVLTRSDKNRGKSDNVPSEEVVKKMKNYWRQLLNAKLITQRKFDNLTKAERGGLSELDKAGFIKRQLVETRQITKHVAQILDSRMNTKYDENDKLIREVKVITLKSKLVSDFRKDFQFYKVREINNYHHAHDAYLNAVVGTALIKKYPKLESEFVYGDYKVYDVRKMIAKSEQEIGKATAKYFFYSNIMNFFKTEITLANGEIRKRPLIETNGETGEIVWDKGRDFATVRKVLSMPQVNIVKKTEVQTGGFSKESILPKRNSDKLIARKKDWDPKKYGGFDSPTVAYSVLVVAKVEKGKSKKLKSVKELLGITIMERSSFEKNPIDFLEAKGYKEVKKDLIIKLPKYSLFELENGRKRMLASAGELQKGNELALPSKYVNFLYLASHYEKLKGSPEDNEQKQLFVEQHKHYLDEIIEQISEFSKRVILADANLDKVLSAYNKHRDKPIREQAENIIHLFTLTNLGAPAAFKYFDTTIDRKRYTSTKEVLDATLIHQSITGLYETRIDLSQLGGDSGGSGGSGGSTNLSDIIEKETGKQLVIQESILMLPEEVEEVIGNKPESDILVHTAYDESTDENVMLLTSDAPEYKPWALVIQDSNGENKIKMLSGGSGGSGGSTNLSDIIEKETGKQLVIQESILMLPEEVEEVIGNKPESDILVHTAYDESTDENVMLLTSDAPEYKPWALVIQDSNGENKIKMLSGGSKRTADGSEFEPKKKRKV

SEQ ID NO: 25 - protein, 1812 aa, Artificial sequence
  Synthetic polypeptide
MKRTADGSEFESPKKKRKVDPATFTFNFNNEPWVRGRHKTYLCYEVERMHNDTWVLLAQRRGFLCNQAKNLLCGFYGRHAELCFLDVIPFWKLDLDQDYRVTCFTSWSPCFSCAQEMAKFISKNKHVSLCIFAARIYDDKGLCKEGLRTLAEAGAKISIMTYSEFKHCWDTFVDHQGCPFQPWDGLDEHSQDLSGRLRAILQNQENSGGSSGGSSGSETPGTSESATPESSGGSSGGSDKKYSIGLAIGTNSVGWAVITDEYKVPSKKFKVLGNTDRHSIKKNLIGALLFDSGETAEATRLKRTARRRYTRRKNRICYLQEIFSNEMAKVDDSFFHRLEESFLVEEDKKHERHPIFGNIVDEVAYHEKYPTIYHLRKKLVDSTDKADLRLIYLALAHMIKFRGHFLIEGDLNPDNSDVDKLFIQLVQTYNQLFEENPINASGVDAKAILSARLSKSRRLENLIAQLPGEKKNGLFGNLIALSLGLTPNFKSNFDLAEDAKLQLSKDTYDDDLDNLLAQIGDQYADLFLAAKNLSDAILLSDILRVNTEITKAPLSASMIKRYDEHHQDLTLLKALVRQQLPEKYKEIFFDQSKNGYAGYIDGGASQEEFYKFIKPILEKMDGTEELLVKLNREDLLRKQRTFDNGSIPHQIHLGELHAILRRQEDFYPFLKDNREKIEKILTFRIPYYVGPLARGNSRFAWMTRKSEETITPWNFEEVVDKGASAQSFIERMTNFDKNLPNEKVLPKHSLLYEYFTVYNELTKVKYVTEGMRKPAFLSGEQKKAIVDLLFKTNRKVTVKQLKEDYFKKIECFDSVEISGVEDRFNASLGTYHDLLKIIKDKDFLDNEENEDILEDIVLTLTLFEDREMIEERLKTYAHLFDDKVMKQLKRRRYTGWGRLSRKLINGIRDKQSGKTILDFLKSDGFANRNFMQLIHDDSLTFKEDIQKAQVSGQGDSLHEHIANLAGSPAIKKGILQTVKVVDELVKVMGRHKPENIVIEMARENQTTQKGQKNSRERMKRIEEGIKELGSQILKEHPVENTQLQNEKLYLYYLQNGRDMYVDQELDINRLSDYDVDHIVPQSFLKDDSIDNKVLTRSDKNRGKSDNVPSEEVVKKMKNYWRQLLNAKLITQRKFDNLTKAERGGLSELDKAGFIKRQLVETRQITKHVAQILDSRMNTKYDENDKLIREVKVITLKSKLVSDFRKDFQFYKVREINNYHHAHDAYLNAVVGTALIKKYPKLESEFVYGDYKVYDVRKMIAKSEQEIGKATAKYFFYSNIMNFFKTEITLANGEIRKRPLIETNGETGEIVWDKGRDFATVRKVLSMPQVNIVKKTEVQTGGFSKESILPKRNSDKLIARKKDWDPKKYGGFDSPTVAYSVLVVAKVEKGKSKKLKSVKELLGITIMERSSFEKNPIDFLEAKGYKEVKKDLIIKLPKYSLFELENGRKRMLASAGELQKGNELALPSKYVNFLYLASHYEKLKGSPEDNEQKQLFVEQHKHYLDEIIEQISEFSKRVILADANLDKVLSAYNKHRDKPIREQAENIIHLFTLTNLGAPAAFKYFDTTIDRKRYTSTKEVLDATLIHQSITGLYETRIDLSQLGGDSGGSGGSGGSTNLSDIIEKETGKQLVIQESILMLPEEVEEVIGNKPESDILVHTAYDESTDENVMLLTSDAPEYKPWALVIQDSNGENKIKMLSGGSGGSGGSTNLSDIIEKETGKQLVIQESILMLPEEVEEVIGNKPESDILVHTAYDESTDENVMLLTSDAPEYKPWALVIQDSNGENKIKMLSGGSKRTADGSEFEPKKKRKV

SEQ ID NO: 26 - protein, 1812 aa, Artificial sequence
  Synthetic polypeptide
MKRTADGSEFESPKKKRKVDPATFTFNFNNEPWVRGRHETYLCYEVERMHNDTWVLLAQRRGFLCNQAKHKHGFLEGRHAELCFLDVIPFWKLDLDQDYRVTCFTSWSPCFSCAQEMAKFISKNKHVSLCIFTARIFDDKGRCKEGLRTLAEAGAKISIMTYSEFKHCWDTFVDHQGCPFQPWDGLDEHSQDLSGRLRAILQNQENSGGSSGGSSGSETPGTSESATPESSGGSSGGSDKKYSIGLAIGTNSVGWAVITDEYKVPSKKFKVLGNTDRHSIKKNLIGALLFDSGETAEATRLKRTARRRYTRRKNRICYLQEIFSNEMAKVDDSFFHRLEESFLVEEDKKHERHPIFGNIVDEVAYHEKYPTIYHLRKKLVDSTDKADLRLIYLALAHMIKFRGHFLIEGDLNPDNSDVDKLFIQLVQTYNQLFEENPINASGVDAKAILSARLSKSRRLENLIAQLPGEKKNGLFGNLIALSLGLTPNFKSNFDLAEDAKLQLSKDTYDDDLDNLLAQIGDQYADLFLAAKNLSDAILLSDILRVNTEITKAPLSASMIKRYDEHHQDLTLLKALVRQQLPEKYKEIFFDQSKNGYAGYIDGGASQEEFYKFIKPILEKMDGTEELLVKLNREDLLRKQRTFDNGSIPHQIHLGELHAILRRQEDFYPFLKDNREKIEKILTFRIPYYVGPLARGNSRFAWMTRKSEETITPWNFEEVVDKGASAQSFIERMTNFDKNLPNEKVLPKHSLLYEYFTVYNELTKVKYVTEGMRKPAFLSGEQKKAIVDLLFKTNRKVTVKQLKEDYFKKIECFDSVEISGVEDRFNASLGTYHDLLKIIKDKDFLDNEENEDILEDIVLTLTLFEDREMIEERLKTYAHLFDDKVMKQLKRRRYTGWGRLSRKLINGIRDKQSGKTILDFLKSDGFANRNFMQLIHDDSLTFKEDIQKAQVSGQGDSLHEHIANLAGSPAIKKGILQTVKVVDELVKVMGRHKPENIVIEMARENQTTQKGQKNSRERMKRIEEGIKELGSQILKEHPVENTQLQNEKLYLYYLQNGRDMYVDQELDINRLSDYDVDHIVPQSFLKDDSIDNKVLTRSDKNRGKSDNVPSEEVVKKMKNYWRQLLNAKLITQRKFDNLTKAERGGLSELDKAGFIKRQLVETRQITKHVAQILDSRMNTKYDENDKLIREVKVITLKSKLVSDFRKDFQFYKVREINNYHHAHDAYLNAVVGTALIKKYPKLESEFVYGDYKVYDVRKMIAKSEQEIGKATAKYFFYSNIMNFFKTEITLANGEIRKRPLIETNGETGEIVWDKGRDFATVRKVLSMPQVNIVKKTEVQTGGFSKESILPKRNSDKLIARKKDWDPKKYGGFDSPTVAYSVLVVAKVEKGKSKKLKSVKELLGITIMERSSFEKNPIDFLEAKGYKEVKKDLIIKLPKYSLFELENGRKRMLASAGELQKGNELALPSKYVNFLYLASHYEKLKGSPEDNEQKQLFVEQHKHYLDEIIEQISEFSKRVILADANLDKVLSAYNKHRDKPIREQAENIIHLFTLTNLGAPAAFKYFDTTIDRKRYTSTKEVLDATLIHQSITGLYETRIDLSQLGGDSGGSGGSGGSTNLSDIIEKETGKQLVIQESILMLPEEVEEVIGNKPESDILVHTAYDESTDENVMLLTSDAPEYKPWALVIQDSNGENKIKMLSGGSGGSGGSTNLSDIIEKETGKQLVIQESILMLPEEVEEVIGNKPESDILVHTAYDESTDENVMLLTSDAPEYKPWALVIQDSNGENKIKMLSGGSKRTADGSEFEPKKKRKV

SEQ ID NO: 27 - protein, 1812 aa, Artificial sequence
  Synthetic polypeptide
MKRTADGSEFESPKKKRKVDPATFTFNFNNEPWVRGRHETYLCYEVERMHNDTWVLLAQRRGFLCNQAKNLLCGFYGRHAELCFLDVIPFWKLDLDQDYRVTCFTSWSPCFSCAQEMAKFISKNKHVSLCIFTARIFDDKGRCKEGLRTLAEAGAKISIMTYSEFKHCWDTFVDHQGCPFQPWDGLDEHSQDLSGRLRAILQNQENSGGSSGGSSGSETPGTSESATPESSGGSSGGSDKKYSIGLAIGTNSVGWAVITDEYKVPSKKFKVLGNTDRHSIKKNLIGALLFDSGETAEATRLKRTARRRYTRRKNRICYLQEIFSNEMAKVDDSFFHRLEESFLVEEDKKHERHPIFGNIVDEVAYHEKYPTIYHLRKKLVDSTDKADLRLIYLALAHMIKFRGHFLIEGDLNPDNSDVDKLFIQLVQTYNQLFEENPINASGVDAKAILSARLSKSRRLENLIAQLPGEKKNGLFGNLIALSLGLTPNFKSNFDLAEDAKLQLSKDTYDDDLDNLLAQIGDQYADLFLAAKNLSDAILLSDILRVNTEITKAPLSASMIKRYDEHHQDLTLLKALVRQQLPEKYKEIFFDQSKNGYAGYIDGGASQEEFYKFIKPILEKMDGTEELLVKLNREDLLRKQRTFDNGSIPHQIHLGELHAILRRQEDFYPFLKDNREKIEKILTFRIPYYVGPLARGNSRFAWMTRKSEETITPWNFEEVVDKGASAQSFIERMTNFDKNLPNEKVLPKHSLLYEYFTVYNELTKVKYVTEGMRKPAFLSGEQKKAIVDLLFKTNRKVTVKQLKEDYFKKIECFDSVEISGVEDRFNASLGTYHDLLKIIKDKDFLDNEENEDILEDIVLTLTLFEDREMIEERLKTYAHLFDDKVMKQLKRRRYTGWGRLSRKLINGIRDKQSGKTILDFLKSDGFANRNFMQLIHDDSLTFKEDIQKAQVSGQGDSLHEHIANLAGSPAIKKGILQTVKVVDELVKVMGRHKPENIVIEMARENQTTQKGQKNSRERMKRIEEGIKELGSQILKEHPVENTQLQNEKLYLYYLQNGRDMYVDQELDINRLSDYDVDHIVPQSFLKDDSIDNKVLTRSDKNRGKSDNVPSEEVVKKMKNYWRQLLNAKLITQRKFDNLTKAERGGLSELDKAGFIKRQLVETRQITKHVAQILDSRMNTKYDENDKLIREVKVITLKSKLVSDFRKDFQFYKVREINNYHHAHDAYLNAVVGTALIKKYPKLESEFVYGDYKVYDVRKMIAKSEQEIGKATAKYFFYSNIMNFFKTEITLANGEIRKRPLIETNGETGEIVWDKGRDFATVRKVLSMPQVNIVKKTEVQTGGFSKESILPKRNSDKLIARKKDWDPKKYGGFDSPTVAYSVLVVAKVEKGKSKKLKSVKELLGITIMERSSFEKNPIDFLEAKGYKEVKKDLIIKLPKYSLFELENGRKRMLASAGELQKGNELALPSKYVNFLYLASHYEKLKGSPEDNEQKQLFVEQHKHYLDEIIEQISEFSKRVILADANLDKVLSAYNKHRDKPIREQAENIIHLFTLTNLGAPAAFKYFDTTIDRKRYTSTKEVLDATLIHQSITGLYETRIDLSQLGGDSGGSGGSGGSTNLSDIIEKETGKQLVIQESILMLPEEVEEVIGNKPESDILVHTAYDESTDENVMLLTSDAPEYKPWALVIQDSNGENKIKMLSGGSGGSGGSTNLSDIIEKETGKQLVIQESILMLPEEVEEVIGNKPESDILVHTAYDESTDENVMLLTSDAPEYKPWALVIQDSNGENKIKMLSGGSKRTADGSEFEPKKKRKV

SEQ ID NO: 28 - protein, 1812 aa, Artificial sequence
  Synthetic polypeptide
MKRTADGSEFESPKKKRKVDPATFTFNFNNEPWVRGRHETYLCYEVERMHNDTWVKLAQRRGFLANQAKHKHGFLEGRHAELCFLDVIPFWKLDLDQDYRVTCFTSWSPCFSCAQEMAKFISKNKHVSLCIKTARIFDDKGRAKEGLRTLAEAGAKISIMTYSEFKHCWDTFVDHQGAPFQPWDGLDEHSQDLSGRLRAILQNQENSGGSSGGSSGSETPGTSESATPESSGGSSGGSDKKYSIGLAIGTNSVGWAVITDEYKVPSKKFKVLGNTDRHSIKKNLIGALLFDSGETAEATRLKRTARRRYTRRKNRICYLQEIFSNEMAKVDDSFFHRLEESFLVEEDKKHERHPIFGNIVDEVAYHEKYPTIYHLRKKLVDSTDKADLRLIYLALAHMIKFRGHFLIEGDLNPDNSDVDKLFIQLVQTYNQLFEENPINASGVDAKAILSARLSKSRRLENLIAQLPGEKKNGLFGNLIALSLGLTPNFKSNFDLAEDAKLQLSKDTYDDDLDNLLAQIGDQYADLFLAAKNLSDAILLSDILRVNTEITKAPLSASMIKRYDEHHQDLTLLKALVRQQLPEKYKEIFFDQSKNGYAGYIDGGASQEEFYKFIKPILEKMDGTEELLVKLNREDLLRKQRTFDNGSIPHQIHLGELHAILRRQEDFYPFLKDNREKIEKILTFRIPYYVGPLARGNSRFAWMTRKSEETITPWNFEEVVDKGASAQSFIERMTNFDKNLPNEKVLPKHSLLYEYFTVYNELTKVKYVTEGMRKPAFLSGEQKKAIVDLLFKTNRKVTVKQLKEDYFKKIECFDSVEISGVEDRFNASLGTYHDLLKIIKDKDFLDNEENEDILEDIVLTLTLFEDREMIEERLKTYAHLFDDKVMKQLKRRRYTGWGRLSRKLINGIRDKQSGKTILDFLKSDGFANRNFMQLIHDDSLTFKEDIQKAQVSGQGDSLHEHIANLAGSPAIKKGILQTVKVVDELVKVMGRHKPENIVIEMARENQTTQKGQKNSRERMKRIEEGIKELGSQILKEHPVENTQLQNEKLYLYYLQNGRDMYVDQELDINRLSDYDVDHIVPQSFLKDDSIDNKVLTRSDKNRGKSDNVPSEEVVKKMKNYWRQLLNAKLITQRKFDNLTKAERGGLSELDKAGFIKRQLVETRQITKHVAQILDSRMNTKYDENDKLIREVKVITLKSKLVSDFRKDFQFYKVREINNYHHAHDAYLNAVVGTALIKKYPKLESEFVYGDYKVYDVRKMIAKSEQEIGKATAKYFFYSNIMNFFKTEITLANGEIRKRPLIETNGETGEIVWDKGRDFATVRKVLSMPQVNIVKKTEVQTGGFSKESILPKRNSDKLIARKKDWDPKKYGGFDSPTVAYSVLVVAKVEKGKSKKLKSVKELLGITIMERSSFEKNPIDFLEAKGYKEVKKDLIIKLPKYSLFELENGRKRMLASAGELQKGNELALPSKYVNFLYLASHYEKLKGSPEDNEQKQLFVEQHKHYLDEIIEQISEFSKRVILADANLDKVLSAYNKHRDKPIREQAENIIHLFTLTNLGAPAAFKYFDTTIDRKRYTSTKEVLDATLIHQSITGLYETRIDLSQLGGDSGGSGGSGGSTNLSDIIEKETGKQLVIQESILMLPEEVEEVIGNKPESDILVHTAYDESTDENVMLLTSDAPEYKPWALVIQDSNGENKIKMLSGGSGGSGGSTNLSDIIEKETGKQLVIQESILMLPEEVEEVIGNKPESDILVHTAYDESTDENVMLLTSDAPEYKPWALVIQDSNGENKIKMLSGGSKRTADGSEFEPKKKRKV

SEQ ID NO: 29 - protein, 1812 aa, Artificial sequence
  Synthetic polypeptide
MKRTADGSEFESPKKKRKVDPATFTFNFNNEPWVRGRHETYLCYEVERMHNDTWVLLAQRRGFLCNQAKNLLCGFYGRHAELCFLDVIPFWKLDLDQDYRVTCFTSWSPCFSCAQEMAKFISKNKHVSLCIFAARIFDDKGLCKEGLRTLAEAGAKISIMTYSEFKHCWDTFVDHQGCPFQPWDGLDEHSQDLSGRLRAILQNQENSGGSSGGSSGSETPGTSESATPESSGGSSGGSDKKYSIGLAIGTNSVGWAVITDEYKVPSKKFKVLGNTDRHSIKKNLIGALLFDSGETAEATRLKRTARRRYTRRKNRICYLQEIFSNEMAKVDDSFFHRLEESFLVEEDKKHERHPIFGNIVDEVAYHEKYPTIYHLRKKLVDSTDKADLRLIYLALAHMIKFRGHFLIEGDLNPDNSDVDKLFIQLVQTYNQLFEENPINASGVDAKAILSARLSKSRRLENLIAQLPGEKKNGLFGNLIALSLGLTPNFKSNFDLAEDAKLQLSKDTYDDDLDNLLAQIGDQYADLFLAAKNLSDAILLSDILRVNTEITKAPLSASMIKRYDEHHQDLTLLKALVRQQLPEKYKEIFFDQSKNGYAGYIDGGASQEEFYKFIKPILEKMDGTEELLVKLNREDLLRKQRTFDNGSIPHQIHLGELHAILRRQEDFYPFLKDNREKIEKILTFRIPYYVGPLARGNSRFAWMTRKSEETITPWNFEEVVDKGASAQSFIERMTNFDKNLPNEKVLPKHSLLYEYFTVYNELTKVKYVTEGMRKPAFLSGEQKKAIVDLLFKTNRKVTVKQLKEDYFKKIECFDSVEISGVEDRFNASLGTYHDLLKIIKDKDFLDNEENEDILEDIVLTLTLFEDREMIEERLKTYAHLFDDKVMKQLKRRRYTGWGRLSRKLINGIRDKQSGKTILDFLKSDGFANRNFMQLIHDDSLTFKEDIQKAQVSGQGDSLHEHIANLAGSPAIKKGILQTVKVVDELVKVMGRHKPENIVIEMARENQTTQKGQKNSRERMKRIEEGIKELGSQILKEHPVENTQLQNEKLYLYYLQNGRDMYVDQELDINRLSDYDVDHIVPQSFLKDDSIDNKVLTRSDKNRGKSDNVPSEEVVKKMKNYWRQLLNAKLITQRKFDNLTKAERGGLSELDKAGFIKRQLVETRQITKHVAQILDSRMNTKYDENDKLIREVKVITLKSKLVSDFRKDFQFYKVREINNYHHAHDAYLNAVVGTALIKKYPKLESEFVYGDYKVYDVRKMIAKSEQEIGKATAKYFFYSNIMNFFKTEITLANGEIRKRPLIETNGETGEIVWDKGRDFATVRKVLSMPQVNIVKKTEVQTGGFSKESILPKRNSDKLIARKKDWDPKKYGGFDSPTVAYSVLVVAKVEKGKSKKLKSVKELLGITIMERSSFEKNPIDFLEAKGYKEVKKDLIIKLPKYSLFELENGRKRMLASAGELQKGNELALPSKYVNFLYLASHYEKLKGSPEDNEQKQLFVEQHKHYLDEIIEQISEFSKRVILADANLDKVLSAYNKHRDKPIREQAENIIHLFTLTNLGAPAAFKYFDTTIDRKRYTSTKEVLDATLIHQSITGLYETRIDLSQLGGDSGGSGGSGGSTNLSDIIEKETGKQLVIQESILMLPEEVEEVIGNKPESDILVHTAYDESTDENVMLLTSDAPEYKPWALVIQDSNGENKIKMLSGGSGGSGGSTNLSDIIEKETGKQLVIQESILMLPEEVEEVIGNKPESDILVHTAYDESTDENVMLLTSDAPEYKPWALVIQDSNGENKIKMLSGGSKRTADGSEFEPKKKRKV

SEQ ID NO: 30 - protein, 1812 aa, Artificial sequence
  Synthetic polypeptide
MKRTADGSEFESPKKKRKVDPATFTFNFNNEPWVRGRHETYLCYEVERMHNDTWVLLAQRRGFLCGQAKNLLCGFYGRHAELCFLDVIPFWKLDLDQDYRVTCFTSWSPCFSCAQEMAKFISKNKHVSLCIFAARIYDDKGLCKEGLRTLAEAGAKISIMTYSEFKHCWDTFVDHQGCPFQPWDGLDEHSQDLSGRLRAILQNQENSGGSSGGSSGSETPGTSESATPESSGGSSGGSDKKYSIGLAIGTNSVGWAVITDEYKVPSKKFKVLGNTDRHSIKKNLIGALLFDSGETAEATRLKRTARRRYTRRKNRICYLQEIFSNEMAKVDDSFFHRLEESFLVEEDKKHERHPIFGNIVDEVAYHEKYPTIYHLRKKLVDSTDKADLRLIYLALAHMIKFRGHFLIEGDLNPDNSDVDKLFIQLVQTYNQLFEENPINASGVDAKAILSARLSKSRRLENLIAQLPGEKKNGLFGNLIALSLGLTPNFKSNFDLAEDAKLQLSKDTYDDDLDNLLAQIGDQYADLFLAAKNLSDAILLSDILRVNTEITKAPLSASMIKRYDEHHQDLTLLKALVRQQLPEKYKEIFFDQSKNGYAGYIDGGASQEEFYKFIKPILEKMDGTEELLVKLNREDLLRKQRTFDNGSIPHQIHLGELHAILRRQEDFYPFLKDNREKIEKILTFRIPYYVGPLARGNSRFAWMTRKSEETITPWNFEEVVDKGASAQSFIERMTNFDKNLPNEKVLPKHSLLYEYFTVYNELTKVKYVTEGMRKPAFLSGEQKKAIVDLLFKTNRKVTVKQLKEDYFKKIECFDSVEISGVEDRFNASLGTYHDLLKIIKDKDFLDNEENEDILEDIVLTLTLFEDREMIEERLKTYAHLFDDKVMKQLKRRRYTGWGRLSRKLINGIRDKQSGKTILDFLKSDGFANRNFMQLIHDDSLTFKEDIQKAQVSGQGDSLHEHIANLAGSPAIKKGILQTVKVVDELVKVMGRHKPENIVIEMARENQTTQKGQKNSRERMKRIEEGIKELGSQILKEHPVENTQLQNEKLYLYYLQNGRDMYVDQELDINRLSDYDVDHIVPQSFLKDDSIDNKVLTRSDKNRGKSDNVPSEEVVKKMKNYWRQLLNAKLITQRKFDNLTKAERGGLSELDKAGFIKRQLVETRQITKHVAQILDSRMNTKYDENDKLIREVKVITLKSKLVSDFRKDFQFYKVREINNYHHAHDAYLNAVVGTALIKKYPKLESEFVYGDYKVYDVRKMIAKSEQEIGKATAKYFFYSNIMNFFKTEITLANGEIRKRPLIETNGETGEIVWDKGRDFATVRKVLSMPQVNIVKKTEVQTGGFSKESILPKRNSDKLIARKKDWDPKKYGGFDSPTVAYSVLVVAKVEKGKSKKLKSVKELLGITIMERSSFEKNPIDFLEAKGYKEVKKDLIIKLPKYSLFELENGRKRMLASAGELQKGNELALPSKYVNFLYLASHYEKLKGSPEDNEQKQLFVEQHKHYLDEIIEQISEFSKRVILADANLDKVLSAYNKHRDKPIREQAENIIHLFTLTNLGAPAAFKYFDTTIDRKRYTSTKEVLDATLIHQSITGLYETRIDLSQLGGDSGGSGGSGGSTNLSDIIEKETGKQLVIQESILMLPEEVEEVIGNKPESDILVHTAYDESTDENVMLLTSDAPEYKPWALVIQDSNGENKIKMLSGGSGGSGGSTNLSDIIEKETGKQLVIQESILMLPEEVEEVIGNKPESDILVHTAYDESTDENVMLLTSDAPEYKPWALVIQDSNGENKIKMLSGGSKRTADGSEFEPKKKRKV

SEQ ID NO: 31 - protein, 1812 aa, Artificial sequence
  Synthetic polypeptide
MKRTADGSEFESPKKKRKVDPATFTFNFNNEPWVRGRHETYLCYEVERMHNDTWVLLAQRRGFLCNQAKNLLCGFYGRHAELCFLDVIPFWKLDLDQDYRVTCFTSWSPCFSCAQEMAKFISKNKHVSLCIFAARIYEDKGLCKEGLRTLAEAGAKISIMTYSEFKHCWDTFVDHQGCPFQPWDGLDEHSQDLSGRLRAILQNQENSGGSSGGSSGSETPGTSESATPESSGGSSGGSDKKYSIGLAIGTNSVGWAVITDEYKVPSKKFKVLGNTDRHSIKKNLIGALLFDSGETAEATRLKRTARRRYTRRKNRICYLQEIFSNEMAKVDDSFFHRLEESFLVEEDKKHERHPIFGNIVDEVAYHEKYPTIYHLRKKLVDSTDKADLRLIYLALAHMIKFRGHFLIEGDLNPDNSDVDKLFIQLVQTYNQLFEENPINASGVDAKAILSARLSKSRRLENLIAQLPGEKKNGLFGNLIALSLGLTPNFKSNFDLAEDAKLQLSKDTYDDDLDNLLAQIGDQYADLFLAAKNLSDAILLSDILRVNTEITKAPLSASMIKRYDEHHQDLTLLKALVRQQLPEKYKEIFFDQSKNGYAGYIDGGASQEEFYKFIKPILEKMDGTEELLVKLNREDLLRKQRTFDNGSIPHQIHLGELHAILRRQEDFYPFLKDNREKIEKILTFRIPYYVGPLARGNSRFAWMTRKSEETITPWNFEEVVDKGASAQSFIERMTNFDKNLPNEKVLPKHSLLYEYFTVYNELTKVKYVTEGMRKPAFLSGEQKKAIVDLLFKTNRKVTVKQLKEDYFKKIECFDSVEISGVEDRFNASLGTYHDLLKIIKDKDFLDNEENEDILEDIVLTLTLFEDREMIEERLKTYAHLFDDKVMKQLKRRRYTGWGRLSRKLINGIRDKQSGKTILDFLKSDGFANRNFMQLIHDDSLTFKEDIQKAQVSGQGDSLHEHIANLAGSPAIKKGILQTVKVVDELVKVMGRHKPENIVIEMARENQTTQKGQKNSRERMKRIEEGIKELGSQILKEHPVENTQLQNEKLYLYYLQNGRDMYVDQELDINRLSDYDVDHIVPQSFLKDDSIDNKVLTRSDKNRGKSDNVPSEEVVKKMKNYWRQLLNAKLITQRKFDNLTKAERGGLSELDKAGFIKRQLVETRQITKHVAQILDSRMNTKYDENDKLIREVKVITLKSKLVSDFRKDFQFYKVREINNYHHAHDAYLNAVVGTALIKKYPKLESEFVYGDYKVYDVRKMIAKSEQEIGKATAKYFFYSNIMNFFKTEITLANGEIRKRPLIETNGETGEIVWDKGRDFATVRKVLSMPQVNIVKKTEVQTGGFSKESILPKRNSDKLIARKKDWDPKKYGGFDSPTVAYSVLVVAKVEKGKSKKLKSVKELLGITIMERSSFEKNPIDFLEAKGYKEVKKDLIIKLPKYSLFELENGRKRMLASAGELQKGNELALPSKYVNFLYLASHYEKLKGSPEDNEQKQLFVEQHKHYLDEIIEQISEFSKRVILADANLDKVLSAYNKHRDKPIREQAENIIHLFTLTNLGAPAAFKYFDTTIDRKRYTSTKEVLDATLIHQSITGLYETRIDLSQLGGDSGGSGGSGGSTNLSDIIEKETGKQLVIQESILMLPEEVEEVIGNKPESDILVHTAYDESTDENVMLLTSDAPEYKPWALVIQDSNGENKIKMLSGGSGGSGGSTNLSDIIEKETGKQLVIQESILMLPEEVEEVIGNKPESDILVHTAYDESTDENVMLLTSDAPEYKPWALVIQDSNGENKIKMLSGGSKRTADGSEFEPKKKRKV

SEQ ID NO: 32 - protein, 1812 aa, Artificial sequence
  Synthetic polypeptide
MKRTADGSEFESPKKKRKVDPATFTFNFNNEPWVRGRHETYLCYEVERMHNDTWVLLAQRRGFLCNQAKNLLCGFYGRHAELCFLDVIPFWKLDLDQDYRVTCFTSWSPCFSCAQEMAKFISKNKHVSLCIFAARIYRRKGLCKEGLRTLAEAGAKISIMTYSEFKHCWDTFVDHQGCPFQPWDGLDEHSQDLSGRLRAILQNQENSGGSSGGSSGSETPGTSESATPESSGGSSGGSDKKYSIGLAIGTNSVGWAVITDEYKVPSKKFKVLGNTDRHSIKKNLIGALLFDSGETAEATRLKRTARRRYTRRKNRICYLQEIFSNEMAKVDDSFFHRLEESFLVEEDKKHERHPIFGNIVDEVAYHEKYPTIYHLRKKLVDSTDKADLRLIYLALAHMIKFRGHFLIEGDLNPDNSDVDKLFIQLVQTYNQLFEENPINASGVDAKAILSARLSKSRRLENLIAQLPGEKKNGLFGNLIALSLGLTPNFKSNFDLAEDAKLQLSKDTYDDDLDNLLAQIGDQYADLFLAAKNLSDAILLSDILRVNTEITKAPLSASMIKRYDEHHQDLTLLKALVRQQLPEKYKEIFFDQSKNGYAGYIDGGASQEEFYKFIKPILEKMDGTEELLVKLNREDLLRKQRTFDNGSIPHQIHLGELHAILRRQEDFYPFLKDNREKIEKILTFRIPYYVGPLARGNSRFAWMTRKSEETITPWNFEEVVDKGASAQSFIERMTNFDKNLPNEKVLPKHSLLYEYFTVYNELTKVKYVTEGMRKPAFLSGEQKKAIVDLLFKTNRKVTVKQLKEDYFKKIECFDSVEISGVEDRFNASLGTYHDLLKIIKDKDFLDNEENEDILEDIVLTLTLFEDREMIEERLKTYAHLFDDKVMKQLKRRRYTGWGRLSRKLINGIRDKQSGKTILDFLKSDGFANRNFMQLIHDDSLTFKEDIQKAQVSGQGDSLHEHIANLAGSPAIKKGILQTVKVVDELVKVMGRHKPENIVIEMARENQTTQKGQKNSRERMKRIEEGIKELGSQILKEHPVENTQLQNEKLYLYYLQNGRDMYVDQELDINRLSDYDVDHIVPQSFLKDDSIDNKVLTRSDKNRGKSDNVPSEEVVKKMKNYWRQLLNAKLITQRKFDNLTKAERGGLSELDKAGFIKRQLVETRQITKHVAQILDSRMNTKYDENDKLIREVKVITLKSKLVSDFRKDFQFYKVREINNYHHAHDAYLNAVVGTALIKKYPKLESEFVYGDYKVYDVRKMIAKSEQEIGKATAKYFFYSNIMNFFKTEITLANGEIRKRPLIETNGETGEIVWDKGRDFATVRKVLSMPQVNIVKKTEVQTGGFSKESILPKRNSDKLIARKKDWDPKKYGGFDSPTVAYSVLVVAKVEKGKSKKLKSVKELLGITIMERSSFEKNPIDFLEAKGYKEVKKDLIIKLPKYSLFELENGRKRMLASAGELQKGNELALPSKYVNFLYLASHYEKLKGSPEDNEQKQLFVEQHKHYLDEIIEQISEFSKRVILADANLDKVLSAYNKHRDKPIREQAENIIHLFTLTNLGAPAAFKYFDTTIDRKRYTSTKEVLDATLIHQSITGLYETRIDLSQLGGDSGGSGGSGGSTNLSDIIEKETGKQLVIQESILMLPEEVEEVIGNKPESDILVHTAYDESTDENVMLLTSDAPEYKPWALVIQDSNGENKIKMLSGGSGGSGGSTNLSDIIEKETGKQLVIQESILMLPEEVEEVIGNKPESDILVHTAYDESTDENVMLLTSDAPEYKPWALVIQDSNGENKIKMLSGGSKRTADGSEFEPKKKRKV

SEQ ID NO: 33 - protein, 1812 aa, Artificial sequence
  Synthetic polypeptide
MKRTADGSEFESPKKKRKVDPATFTFNFNNEPWVRGRHETYLCYEVERMHNDTWVLLAQRRGFLCNQAKNLLCGFYGRHAELCFLDVIPFWKLDLDQDYRVTCFTSYSPCFSCAQEMAKFISKNKHVSLCIFAARIYDDKGECKEGLRTLAEAGAKISIMTYSEFKHCWDTFVDHQGCPFQPWDGLDEHSQDLSGRLRAILQNQENSGGSSGGSSGSETPGTSESATPESSGGSSGGSDKKYSIGLAIGTNSVGWAVITDEYKVPSKKFKVLGNTDRHSIKKNLIGALLFDSGETAEATRLKRTARRRYTRRKNRICYLQEIFSNEMAKVDDSFFHRLEESFLVEEDKKHERHPIFGNIVDEVAYHEKYPTIYHLRKKLVDSTDKADLRLIYLALAHMIKFRGHFLIEGDLNPDNSDVDKLFIQLVQTYNQLFEENPINASGVDAKAILSARLSKSRRLENLIAQLPGEKKNGLFGNLIALSLGLTPNFKSNFDLAEDAKLQLSKDTYDDDLDNLLAQIGDQYADLFLAAKNLSDAILLSDILRVNTEITKAPLSASMIKRYDEHHQDLTLLKALVRQQLPEKYKEIFFDQSKNGYAGYIDGGASQEEFYKFIKPILEKMDGTEELLVKLNREDLLRKQRTFDNGSIPHQIHLGELHAILRRQEDFYPFLKDNREKIEKILTFRIPYYVGPLARGNSRFAWMTRKSEETITPWNFEEVVDKGASAQSFIERMTNFDKNLPNEKVLPKHSLLYEYFTVYNELTKVKYVTEGMRKPAFLSGEQKKAIVDLLFKTNRKVTVKQLKEDYFKKIECFDSVEISGVEDRFNASLGTYHDLLKIIKDKDFLDNEENEDILEDIVLTLTLFEDREMIEERLKTYAHLFDDKVMKQLKRRRYTGWGRLSRKLINGIRDKQSGKTILDFLKSDGFANRNFMQLIHDDSLTFKEDIQKAQVSGQGDSLHEHIANLAGSPAIKKGILQTVKVVDELVKVMGRHKPENIVIEMARENQTTQKGQKNSRERMKRIEEGIKELGSQILKEHPVENTQLQNEKLYLYYLQNGRDMYVDQELDINRLSDYDVDHIVPQSFLKDDSIDNKVLTRSDKNRGKSDNVPSEEVVKKMKNYWRQLLNAKLITQRKFDNLTKAERGGLSELDKAGFIKRQLVETRQITKHVAQILDSRMNTKYDENDKLIREVKVITLKSKLVSDFRKDFQFYKVREINNYHHAHDAYLNAVVGTALIKKYPKLESEFVYGDYKVYDVRKMIAKSEQEIGKATAKYFFYSNIMNFFKTEITLANGEIRKRPLIETNGETGEIVWDKGRDFATVRKVLSMPQVNIVKKTEVQTGGFSKESILPKRNSDKLIARKKDWDPKKYGGFDSPTVAYSVLVVAKVEKGKSKKLKSVKELLGITIMERSSFEKNPIDFLEAKGYKEVKKDLIIKLPKYSLFELENGRKRMLASAGELQKGNELALPSKYVNFLYLASHYEKLKGSPEDNEQKQLFVEQHKHYLDEIIEQISEFSKRVILADANLDKVLSAYNKHRDKPIREQAENIIHLFTLTNLGAPAAFKYFDTTIDRKRYTSTKEVLDATLIHQSITGLYETRIDLSQLGGDSGGSGGSGGSTNLSDIIEKETGKQLVIQESILMLPEEVEEVIGNKPESDILVHTAYDESTDENVMLLTSDAPEYKPWALVIQDSNGENKIKMLSGGSGGSGGSTNLSDIIEKETGKQLVIQESILMLPEEVEEVIGNKPESDILVHTAYDESTDENVMLLTSDAPEYKPWALVIQDSNGENKIKMLSGGSKRTADGSEFEPKKKRKV

SEQ ID NO: 34 - protein, 1812 aa, Artificial sequence
  Synthetic polypeptide
MKRTADGSEFESPKKKRKVDPATFTFNFNNEPWVRGRHETYLCYEVERMHNDTWVLLAQRRGFLCNQAKNLLCGFYGRHAELCFLDVIPFWKLDLDQDYRVTCFTSWSPCFSCAQEMAKFISKNKHVSLCIFAARIWDDKGLCKEGLRTLAEAGAKISIMTYSEFKHCWDTFVDHQGCPFQPWDGLDEHSQDLSGRLRAILQNQENSGGSSGGSSGSETPGTSESATPESSGGSSGGSDKKYSIGLAIGTNSVGWAVITDEYKVPSKKFKVLGNTDRHSIKKNLIGALLFDSGETAEATRLKRTARRRYTRRKNRICYLQEIFSNEMAKVDDSFFHRLEESFLVEEDKKHERHPIFGNIVDEVAYHEKYPTIYHLRKKLVDSTDKADLRLIYLALAHMIKFRGHFLIEGDLNPDNSDVDKLFIQLVQTYNQLFEENPINASGVDAKAILSARLSKSRRLENLIAQLPGEKKNGLFGNLIALSLGLTPNFKSNFDLAEDAKLQLSKDTYDDDLDNLLAQIGDQYADLFLAAKNLSDAILLSDILRVNTEITKAPLSASMIKRYDEHHQDLTLLKALVRQQLPEKYKEIFFDQSKNGYAGYIDGGASQEEFYKFIKPILEKMDGTEELLVKLNREDLLRKQRTFDNGSIPHQIHLGELHAILRRQEDFYPFLKDNREKIEKILTFRIPYYVGPLARGNSRFAWMTRKSEETITPWNFEEVVDKGASAQSFIERMTNFDKNLPNEKVLPKHSLLYEYFTVYNELTKVKYVTEGMRKPAFLSGEQKKAIVDLLFKTNRKVTVKQLKEDYFKKIECFDSVEISGVEDRFNASLGTYHDLLKIIKDKDFLDNEENEDILEDIVLTLTLFEDREMIEERLKTYAHLFDDKVMKQLKRRRYTGWGRLSRKLINGIRDKQSGKTILDFLKSDGFANRNFMQLIHDDSLTFKEDIQKAQVSGQGDSLHEHIANLAGSPAIKKGILQTVKVVDELVKVMGRHKPENIVIEMARENQTTQKGQKNSRERMKRIEEGIKELGSQILKEHPVENTQLQNEKLYLYYLQNGRDMYVDQELDINRLSDYDVDHIVPQSFLKDDSIDNKVLTRSDKNRGKSDNVPSEEVVKKMKNYWRQLLNAKLITQRKFDNLTKAERGGLSELDKAGFIKRQLVETRQITKHVAQILDSRMNTKYDENDKLIREVKVITLKSKLVSDFRKDFQFYKVREINNYHHAHDAYLNAVVGTALIKKYPKLESEFVYGDYKVYDVRKMIAKSEQEIGKATAKYFFYSNIMNFFKTEITLANGEIRKRPLIETNGETGEIVWDKGRDFATVRKVLSMPQVNIVKKTEVQTGGFSKESILPKRNSDKLIARKKDWDPKKYGGFDSPTVAYSVLVVAKVEKGKSKKLKSVKELLGITIMERSSFEKNPIDFLEAKGYKEVKKDLIIKLPKYSLFELENGRKRMLASAGELQKGNELALPSKYVNFLYLASHYEKLKGSPEDNEQKQLFVEQHKHYLDEIIEQISEFSKRVILADANLDKVLSAYNKHRDKPIREQAENIIHLFTLTNLGAPAAFKYFDTTIDRKRYTSTKEVLDATLIHQSITGLYETRIDLSQLGGDSGGSGGSGGSTNLSDIIEKETGKQLVIQESILMLPEEVEEVIGNKPESDILVHTAYDESTDENVMLLTSDAPEYKPWALVIQDSNGENKIKMLSGGSGGSGGSTNLSDIIEKETGKQLVIQESILMLPEEVEEVIGNKPESDILVHTAYDESTDENVMLLTSDAPEYKPWALVIQDSNGENKIKMLSGGSKRTADGSEFEPKKKRKV

SEQ ID NO: 35 - protein, 1812 aa, Artificial sequence
  Synthetic polypeptide
MKRTADGSEFESPKKKRKVDPATFTFNFNNEPWVRGRHETYLCYEVERMHNDTWVLLAQRRGFLCNQAKNLLCGFYGRHAELCFLDVIPFWKLDLDQDYRVTCFTSWSPCFSCAQEMAKFISKNKHVSLCIFAARILDDKGLCKEGLRTLAEAGAKISIMTYSEFKHCWDTFVDHQGCPFQPWDGLDEHSQDLSGRLRAILQNQENSGGSSGGSSGSETPGTSESATPESSGGSSGGSDKKYSIGLAIGTNSVGWAVITDEYKVPSKKFKVLGNTDRHSIKKNLIGALLFDSGETAEATRLKRTARRRYTRRKNRICYLQEIFSNEMAKVDDSFFHRLEESFLVEEDKKHERHPIFGNIVDEVAYHEKYPTIYHLRKKLVDSTDKADLRLIYLALAHMIKFRGHFLIEGDLNPDNSDVDKLFIQLVQTYNQLFEENPINASGVDAKAILSARLSKSRRLENLIAQLPGEKKNGLFGNLIALSLGLTPNFKSNFDLAEDAKLQLSKDTYDDDLDNLLAQIGDQYADLFLAAKNLSDAILLSDILRVNTEITKAPLSASMIKRYDEHHQDLTLLKALVRQQLPEKYKEIFFDQSKNGYAGYIDGGASQEEFYKFIKPILEKMDGTEELLVKLNREDLLRKQRTFDNGSIPHQIHLGELHAILRRQEDFYPFLKDNREKIEKILTFRIPYYVGPLARGNSRFAWMTRKSEETITPWNFEEVVDKGASAQSFIERMTNFDKNLPNEKVLPKHSLLYEYFTVYNELTKVKYVTEGMRKPAFLSGEQKKAIVDLLFKTNRKVTVKQLKEDYFKKIECFDSVEISGVEDRFNASLGTYHDLLKIIKDKDFLDNEENEDILEDIVLTLTLFEDREMIEERLKTYAHLFDDKVMKQLKRRRYTGWGRLSRKLINGIRDKQSGKTILDFLKSDGFANRNFMQLIHDDSLTFKEDIQKAQVSGQGDSLHEHIANLAGSPAIKKGILQTVKVVDELVKVMGRHKPENIVIEMARENQTTQKGQKNSRERMKRIEEGIKELGSQILKEHPVENTQLQNEKLYLYYLQNGRDMYVDQELDINRLSDYDVDHIVPQSFLKDDSIDNKVLTRSDKNRGKSDNVPSEEVVKKMKNYWRQLLNAKLITQRKFDNLTKAERGGLSELDKAGFIKRQLVETRQITKHVAQILDSRMNTKYDENDKLIREVKVITLKSKLVSDFRKDFQFYKVREINNYHHAHDAYLNAVVGTALIKKYPKLESEFVYGDYKVYDVRKMIAKSEQEIGKATAKYFFYSNIMNFFKTEITLANGEIRKRPLIETNGETGEIVWDKGRDFATVRKVLSMPQVNIVKKTEVQTGGFSKESILPKRNSDKLIARKKDWDPKKYGGFDSPTVAYSVLVVAKVEKGKSKKLKSVKELLGITIMERSSFEKNPIDFLEAKGYKEVKKDLIIKLPKYSLFELENGRKRMLASAGELQKGNELALPSKYVNFLYLASHYEKLKGSPEDNEQKQLFVEQHKHYLDEIIEQISEFSKRVILADANLDKVLSAYNKHRDKPIREQAENIIHLFTLTNLGAPAAFKYFDTTIDRKRYTSTKEVLDATLIHQSITGLYETRIDLSQLGGDSGGSGGSGGSTNLSDIIEKETGKQLVIQESILMLPEEVEEVIGNKPESDILVHTAYDESTDENVMLLTSDAPEYKPWALVIQDSNGENKIKMLSGGSGGSGGSTNLSDIIEKETGKQLVIQESILMLPEEVEEVIGNKPESDILVHTAYDESTDENVMLLTSDAPEYKPWALVIQDSNGENKIKMLSGGSKRTADGSEFEPKKKRKV

SEQ ID NO: 36 - protein, 1812 aa, Artificial sequence
  Synthetic polypeptide
MKRTADGSEFESPKKKRKVDPATFTFNFNNEPWVRGRHETYLCYEVERMHNDTWVLLAQRRGFLCQQAKNLLCGFYGRHAELCFLDVIPFWKLDLDQDYRVTCFTSWSPCFSCAQEMAKFISKNKHVSLCIFAARIFDDKGLCKEGLRTLAEAGAKISIMTYSEFKHCWDTFVDHQGCPFQPWDGLDEHSQDLSGRLRAILQNQENSGGSSGGSSGSETPGTSESATPESSGGSSGGSDKKYSIGLAIGTNSVGWAVITDEYKVPSKKFKVLGNTDRHSIKKNLIGALLFDSGETAEATRLKRTARRRYTRRKNRICYLQEIFSNEMAKVDDSFFHRLEESFLVEEDKKHERHPIFGNIVDEVAYHEKYPTIYHLRKKLVDSTDKADLRLIYLALAHMIKFRGHFLIEGDLNPDNSDVDKLFIQLVQTYNQLFEENPINASGVDAKAILSARLSKSRRLENLIAQLPGEKKNGLFGNLIALSLGLTPNFKSNFDLAEDAKLQLSKDTYDDDLDNLLAQIGDQYADLFLAAKNLSDAILLSDILRVNTEITKAPLSASMIKRYDEHHQDLTLLKALVRQQLPEKYKEIFFDQSKNGYAGYIDGGASQEEFYKFIKPILEKMDGTEELLVKLNREDLLRKQRTFDNGSIPHQIHLGELHAILRRQEDFYPFLKDNREKIEKILTFRIPYYVGPLARGNSRFAWMTRKSEETITPWNFEEVVDKGASAQSFIERMTNFDKNLPNEKVLPKHSLLYEYFTVYNELTKVKYVTEGMRKPAFLSGEQKKAIVDLLFKTNRKVTVKQLKEDYFKKIECFDSVEISGVEDRFNASLGTYHDLLKIIKDKDFLDNEENEDILEDIVLTLTLFEDREMIEERLKTYAHLFDDKVMKQLKRRRYTGWGRLSRKLINGIRDKQSGKTILDFLKSDGFANRNFMQLIHDDSLTFKEDIQKAQVSGQGDSLHEHIANLAGSPAIKKGILQTVKVVDELVKVMGRHKPENIVIEMARENQTTQKGQKNSRERMKRIEEGIKELGSQILKEHPVENTQLQNEKLYLYYLQNGRDMYVDQELDINRLSDYDVDHIVPQSFLKDDSIDNKVLTRSDKNRGKSDNVPSEEVVKKMKNYWRQLLNAKLITQRKFDNLTKAERGGLSELDKAGFIKRQLVETRQITKHVAQILDSRMNTKYDENDKLIREVKVITLKSKLVSDFRKDFQFYKVREINNYHHAHDAYLNAVVGTALIKKYPKLESEFVYGDYKVYDVRKMIAKSEQEIGKATAKYFFYSNIMNFFKTEITLANGEIRKRPLIETNGETGEIVWDKGRDFATVRKVLSMPQVNIVKKTEVQTGGFSKESILPKRNSDKLIARKKDWDPKKYGGFDSPTVAYSVLVVAKVEKGKSKKLKSVKELLGITIMERSSFEKNPIDFLEAKGYKEVKKDLIIKLPKYSLFELENGRKRMLASAGELQKGNELALPSKYVNFLYLASHYEKLKGSPEDNEQKQLFVEQHKHYLDEIIEQISEFSKRVILADANLDKVLSAYNKHRDKPIREQAENIIHLFTLTNLGAPAAFKYFDTTIDRKRYTSTKEVLDATLIHQSITGLYETRIDLSQLGGDSGGSGGSGGSTNLSDIIEKETGKQLVIQESILMLPEEVEEVIGNKPESDILVHTAYDESTDENVMLLTSDAPEYKPWALVIQDSNGENKIKMLSGGSGGSGGSTNLSDIIEKETGKQLVIQESILMLPEEVEEVIGNKPESDILVHTAYDESTDENVMLLTSDAPEYKPWALVIQDSNGENKIKMLSGGSKRTADGSEFEPKKKRKV

SEQ ID NO: 37 - protein, 1812 aa, Artificial sequence
  Synthetic polypeptide
MKRTADGSEFESPKKKRKVDPATFTFNFNNEPWVRGRHETYLCYEVERMHNDTWVLLAQRRGFLCNQAKNLLCGFYGRHAELCFLDVIPFWKLDLDQDYRVTCFTSWAPCFSCAQEMAKFISKNKHVSLCIFAARIFDDKGLCKEGLRTLAEAGAKISIMTYSEFKHCWDTFVDHQGCPFQPWDGLDEHSQDLSGRLRAILQNQENSGGSSGGSSGSETPGTSESATPESSGGSSGGSDKKYSIGLAIGTNSVGWAVITDEYKVPSKKFKVLGNTDRHSIKKNLIGALLFDSGETAEATRLKRTARRRYTRRKNRICYLQEIFSNEMAKVDDSFFHRLEESFLVEEDKKHERHPIFGNIVDEVAYHEKYPTIYHLRKKLVDSTDKADLRLIYLALAHMIKFRGHFLIEGDLNPDNSDVDKLFIQLVQTYNQLFEENPINASGVDAKAILSARLSKSRRLENLIAQLPGEKKNGLFGNLIALSLGLTPNFKSNFDLAEDAKLQLSKDTYDDDLDNLLAQIGDQYADLFLAAKNLSDAILLSDILRVNTEITKAPLSASMIKRYDEHHQDLTLLKALVRQQLPEKYKEIFFDQSKNGYAGYIDGGASQEEFYKFIKPILEKMDGTEELLVKLNREDLLRKQRTFDNGSIPHQIHLGELHAILRRQEDFYPFLKDNREKIEKILTFRIPYYVGPLARGNSRFAWMTRKSEETITPWNFEEVVDKGASAQSFIERMTNFDKNLPNEKVLPKHSLLYEYFTVYNELTKVKYVTEGMRKPAFLSGEQKKAIVDLLFKTNRKVTVKQLKEDYFKKIECFDSVEISGVEDRFNASLGTYHDLLKIIKDKDFLDNEENEDILEDIVLTLTLFEDREMIEERLKTYAHLFDDKVMKQLKRRRYTGWGRLSRKLINGIRDKQSGKTILDFLKSDGFANRNFMQLIHDDSLTFKEDIQKAQVSGQGDSLHEHIANLAGSPAIKKGILQTVKVVDELVKVMGRHKPENIVIEMARENQTTQKGQKNSRERMKRIEEGIKELGSQILKEHPVENTQLQNEKLYLYYLQNGRDMYVDQELDINRLSDYDVDHIVPQSFLKDDSIDNKVLTRSDKNRGKSDNVPSEEVVKKMKNYWRQLLNAKLITQRKFDNLTKAERGGLSELDKAGFIKRQLVETRQITKHVAQILDSRMNTKYDENDKLIREVKVITLKSKLVSDFRKDFQFYKVREINNYHHAHDAYLNAVVGTALIKKYPKLESEFVYGDYKVYDVRKMIAKSEQEIGKATAKYFFYSNIMNFFKTEITLANGEIRKRPLIETNGETGEIVWDKGRDFATVRKVLSMPQVNIVKKTEVQTGGFSKESILPKRNSDKLIARKKDWDPKKYGGFDSPTVAYSVLVVAKVEKGKSKKLKSVKELLGITIMERSSFEKNPIDFLEAKGYKEVKKDLIIKLPKYSLFELENGRKRMLASAGELQKGNELALPSKYVNFLYLASHYEKLKGSPEDNEQKQLFVEQHKHYLDEIIEQISEFSKRVILADANLDKVLSAYNKHRDKPIREQAENIIHLFTLTNLGAPAAFKYFDTTIDRKRYTSTKEVLDATLIHQSITGLYETRIDLSQLGGDSGGSGGSGGSTNLSDIIEKETGKQLVIQESILMLPEEVEEVIGNKPESDILVHTAYDESTDENVMLLTSDAPEYKPWALVIQDSNGENKIKMLSGGSGGSGGSTNLSDIIEKETGKQLVIQESILMLPEEVEEVIGNKPESDILVHTAYDESTDENVMLLTSDAPEYKPWALVIQDSNGENKIKMLSGGSKRTADGSEFEPKKKRKV

SEQ ID NO: 38 - protein, 1812 aa, Artificial sequence
  Synthetic polypeptide
MKRTADGSEFESPKKKRKVDPATFTFNFNNEPWVRGRHETYLCYEVERMHNDTWVLLAQRRGFLCNQAKNLLCGFYGRHAELCFLDVIPFWKLDLDQDYRVTCFTSWSPCFSCAQEMAKFISKNKHVSLCIFAAAIFDDKGLCKEGLRTLAEAGAKISIMTYSEFKHCWDTFVDHQGCPFQPWDGLDEHSQDLSGRLRAILQNQENSGGSSGGSSGSETPGTSESATPESSGGSSGGSDKKYSIGLAIGTNSVGWAVITDEYKVPSKKFKVLGNTDRHSIKKNLIGALLFDSGETAEATRLKRTARRRYTRRKNRICYLQEIFSNEMAKVDDSFFHRLEESFLVEEDKKHERHPIFGNIVDEVAYHEKYPTIYHLRKKLVDSTDKADLRLIYLALAHMIKFRGHFLIEGDLNPDNSDVDKLFIQLVQTYNQLFEENPINASGVDAKAILSARLSKSRRLENLIAQLPGEKKNGLFGNLIALSLGLTPNFKSNFDLAEDAKLQLSKDTYDDDLDNLLAQIGDQYADLFLAAKNLSDAILLSDILRVNTEITKAPLSASMIKRYDEHHQDLTLLKALVRQQLPEKYKEIFFDQSKNGYAGYIDGGASQEEFYKFIKPILEKMDGTEELLVKLNREDLLRKQRTFDNGSIPHQIHLGELHAILRRQEDFYPFLKDNREKIEKILTFRIPYYVGPLARGNSRFAWMTRKSEETITPWNFEEVVDKGASAQSFIERMTNFDKNLPNEKVLPKHSLLYEYFTVYNELTKVKYVTEGMRKPAFLSGEQKKAIVDLLFKTNRKVTVKQLKEDYFKKIECFDSVEISGVEDRFNASLGTYHDLLKIIKDKDFLDNEENEDILEDIVLTLTLFEDREMIEERLKTYAHLFDDKVMKQLKRRRYTGWGRLSRKLINGIRDKQSGKTILDFLKSDGFANRNFMQLIHDDSLTFKEDIQKAQVSGQGDSLHEHIANLAGSPAIKKGILQTVKVVDELVKVMGRHKPENIVIEMARENQTTQKGQKNSRERMKRIEEGIKELGSQILKEHPVENTQLQNEKLYLYYLQNGRDMYVDQELDINRLSDYDVDHIVPQSFLKDDSIDNKVLTRSDKNRGKSDNVPSEEVVKKMKNYWRQLLNAKLITQRKFDNLTKAERGGLSELDKAGFIKRQLVETRQITKHVAQILDSRMNTKYDENDKLIREVKVITLKSKLVSDFRKDFQFYKVREINNYHHAHDAYLNAVVGTALIKKYPKLESEFVYGDYKVYDVRKMIAKSEQEIGKATAKYFFYSNIMNFFKTEITLANGEIRKRPLIETNGETGEIVWDKGRDFATVRKVLSMPQVNIVKKTEVQTGGFSKESILPKRNSDKLIARKKDWDPKKYGGFDSPTVAYSVLVVAKVEKGKSKKLKSVKELLGITIMERSSFEKNPIDFLEAKGYKEVKKDLIIKLPKYSLFELENGRKRMLASAGELQKGNELALPSKYVNFLYLASHYEKLKGSPEDNEQKQLFVEQHKHYLDEIIEQISEFSKRVILADANLDKVLSAYNKHRDKPIREQAENIIHLFTLTNLGAPAAFKYFDTTIDRKRYTSTKEVLDATLIHQSITGLYETRIDLSQLGGDSGGSGGSGGSTNLSDIIEKETGKQLVIQESILMLPEEVEEVIGNKPESDILVHTAYDESTDENVMLLTSDAPEYKPWALVIQDSNGENKIKMLSGGSGGSGGSTNLSDIIEKETGKQLVIQESILMLPEEVEEVIGNKPESDILVHTAYDESTDENVMLLTSDAPEYKPWALVIQDSNGENKIKMLSGGSKRTADGSEFEPKKKRKV

SEQ ID NO: 39 - protein, 1812 aa, Artificial sequence
  Synthetic polypeptide
MKRTADGSEFESPKKKRKVDPATFTFNFNNEPWVRGRHETYLCYEVERMHNDTWVLLAQRRGFLCNQAKHKHGFLEGRHAELCFLDVIPFWKLDLDQDYRVTCFTSWSPCFSCAQEMAKFISKNKHVSLCIFAARIFDDKGLCKEGLRTLAEAGAKISIMTYSEFKHCWDTFVDHQGCPFQPWDGLDEHSQDLSGRLRAILQNQENSGGSSGGSSGSETPGTSESATPESSGGSSGGSDKKYSIGLAIGTNSVGWAVITDEYKVPSKKFKVLGNTDRHSIKKNLIGALLFDSGETAEATRLKRTARRRYTRRKNRICYLQEIFSNEMAKVDDSFFHRLEESFLVEEDKKHERHPIFGNIVDEVAYHEKYPTIYHLRKKLVDSTDKADLRLIYLALAHMIKFRGHFLIEGDLNPDNSDVDKLFIQLVQTYNQLFEENPINASGVDAKAILSARLSKSRRLENLIAQLPGEKKNGLFGNLIALSLGLTPNFKSNFDLAEDAKLQLSKDTYDDDLDNLLAQIGDQYADLFLAAKNLSDAILLSDILRVNTEITKAPLSASMIKRYDEHHQDLTLLKALVRQQLPEKYKEIFFDQSKNGYAGYIDGGASQEEFYKFIKPILEKMDGTEELLVKLNREDLLRKQRTFDNGSIPHQIHLGELHAILRRQEDFYPFLKDNREKIEKILTFRIPYYVGPLARGNSRFAWMTRKSEETITPWNFEEVVDKGASAQSFIERMTNFDKNLPNEKVLPKHSLLYEYFTVYNELTKVKYVTEGMRKPAFLSGEQKKAIVDLLFKTNRKVTVKQLKEDYFKKIECFDSVEISGVEDRFNASLGTYHDLLKIIKDKDFLDNEENEDILEDIVLTLTLFEDREMIEERLKTYAHLFDDKVMKQLKRRRYTGWGRLSRKLINGIRDKQSGKTILDFLKSDGFANRNFMQLIHDDSLTFKEDIQKAQVSGQGDSLHEHIANLAGSPAIKKGILQTVKVVDELVKVMGRHKPENIVIEMARENQTTQKGQKNSRERMKRIEEGIKELGSQILKEHPVENTQLQNEKLYLYYLQNGRDMYVDQELDINRLSDYDVDHIVPQSFLKDDSIDNKVLTRSDKNRGKSDNVPSEEVVKKMKNYWRQLLNAKLITQRKFDNLTKAERGGLSELDKAGFIKRQLVETRQITKHVAQILDSRMNTKYDENDKLIREVKVITLKSKLVSDFRKDFQFYKVREINNYHHAHDAYLNAVVGTALIKKYPKLESEFVYGDYKVYDVRKMIAKSEQEIGKATAKYFFYSNIMNFFKTEITLANGEIRKRPLIETNGETGEIVWDKGRDFATVRKVLSMPQVNIVKKTEVQTGGFSKESILPKRNSDKLIARKKDWDPKKYGGFDSPTVAYSVLVVAKVEKGKSKKLKSVKELLGITIMERSSFEKNPIDFLEAKGYKEVKKDLIIKLPKYSLFELENGRKRMLASAGELQKGNELALPSKYVNFLYLASHYEKLKGSPEDNEQKQLFVEQHKHYLDEIIEQISEFSKRVILADANLDKVLSAYNKHRDKPIREQAENIIHLFTLTNLGAPAAFKYFDTTIDRKRYTSTKEVLDATLIHQSITGLYETRIDLSQLGGDSGGSGGSGGSTNLSDIIEKETGKQLVIQESILMLPEEVEEVIGNKPESDILVHTAYDESTDENVMLLTSDAPEYKPWALVIQDSNGENKIKMLSGGSGGSGGSTNLSDIIEKETGKQLVIQESILMLPEEVEEVIGNKPESDILVHTAYDESTDENVMLLTSDAPEYKPWALVIQDSNGENKIKMLSGGSKRTADGSEFEPKKKRKV

SEQ ID NO: 40 - protein, 1812 aa, Artificial sequence
  Synthetic polypeptide
MKRTADGSEFESPKKKRKVDPATFTFNFNNEPWVRGRHETYLCYEVERMHNDTWVLLAQRRGFLCNQAKNLLCGFYGRHAELCFLDVIPFWKLDLDQDYRVTCFTSWSPCFSCAQEMAKFISKNKHVSLCIFAAAIYDDKGLCKEGLRTLAEAGAKISIMTYSEFKHCWDTFVDHQGCPFQPWDGLDEHSQDLSGRLRAILQNQENSGGSSGGSSGSETPGTSESATPESSGGSSGGSDKKYSIGLAIGTNSVGWAVITDEYKVPSKKFKVLGNTDRHSIKKNLIGALLFDSGETAEATRLKRTARRRYTRRKNRICYLQEIFSNEMAKVDDSFFHRLEESFLVEEDKKHERHPIFGNIVDEVAYHEKYPTIYHLRKKLVDSTDKADLRLIYLALAHMIKFRGHFLIEGDLNPDNSDVDKLFIQLVQTYNQLFEENPINASGVDAKAILSARLSKSRRLENLIAQLPGEKKNGLFGNLIALSLGLTPNFKSNFDLAEDAKLQLSKDTYDDDLDNLLAQIGDQYADLFLAAKNLSDAILLSDILRVNTEITKAPLSASMIKRYDEHHQDLTLLKALVRQQLPEKYKEIFFDQSKNGYAGYIDGGASQEEFYKFIKPILEKMDGTEELLVKLNREDLLRKQRTFDNGSIPHQIHLGELHAILRRQEDFYPFLKDNREKIEKILTFRIPYYVGPLARGNSRFAWMTRKSEETITPWNFEEVVDKGASAQSFIERMTNFDKNLPNEKVLPKHSLLYEYFTVYNELTKVKYVTEGMRKPAFLSGEQKKAIVDLLFKTNRKVTVKQLKEDYFKKIECFDSVEISGVEDRFNASLGTYHDLLKIIKDKDFLDNEENEDILEDIVLTLTLFEDREMIEERLKTYAHLFDDKVMKQLKRRRYTGWGRLSRKLINGIRDKQSGKTILDFLKSDGFANRNFMQLIHDDSLTFKEDIQKAQVSGQGDSLHEHIANLAGSPAIKKGILQTVKVVDELVKVMGRHKPENIVIEMARENQTTQKGQKNSRERMKRIEEGIKELGSQILKEHPVENTQLQNEKLYLYYLQNGRDMYVDQELDINRLSDYDVDHIVPQSFLKDDSIDNKVLTRSDKNRGKSDNVPSEEVVKKMKNYWRQLLNAKLITQRKFDNLTKAERGGLSELDKAGFIKRQLVETRQITKHVAQILDSRMNTKYDENDKLIREVKVITLKSKLVSDFRKDFQFYKVREINNYHHAHDAYLNAVVGTALIKKYPKLESEFVYGDYKVYDVRKMIAKSEQEIGKATAKYFFYSNIMNFFKTEITLANGEIRKRPLIETNGETGEIVWDKGRDFATVRKVLSMPQVNIVKKTEVQTGGFSKESILPKRNSDKLIARKKDWDPKKYGGFDSPTVAYSVLVVAKVEKGKSKKLKSVKELLGITIMERSSFEKNPIDFLEAKGYKEVKKDLIIKLPKYSLFELENGRKRMLASAGELQKGNELALPSKYVNFLYLASHYEKLKGSPEDNEQKQLFVEQHKHYLDEIIEQISEFSKRVILADANLDKVLSAYNKHRDKPIREQAENIIHLFTLTNLGAPAAFKYFDTTIDRKRYTSTKEVLDATLIHQSITGLYETRIDLSQLGGDSGGSGGSGGSTNLSDIIEKETGKQLVIQESILMLPEEVEEVIGNKPESDILVHTAYDESTDENVMLLTSDAPEYKPWALVIQDSNGENKIKMLSGGSGGSGGSTNLSDIIEKETGKQLVIQESILMLPEEVEEVIGNKPESDILVHTAYDESTDENVMLLTSDAPEYKPWALVIQDSNGENKIKMLSGGSKRTADGSEFEPKKKRKV

SEQ ID NO: 41 - protein, 1812 aa, Artificial sequence
  Synthetic polypeptide
MKRTADGSEFESPKKKRKVDPATFTFNFNNEPWVRGRHETYLCYEVERMHNDTWVLLAQRRGFLCQQAKNLLCGFYGRHAELCFLDVIPFWKLDLDQDYRVTCFTSWSPCFSCAQEMAKFISKNKHVSLCIFAARIYDDKGLCKEGLRTLAEAGAKISIMTYSEFKHCWDTFVDHQGCPFQPWDGLDEHSQDLSGRLRAILQNQENSGGSSGGSSGSETPGTSESATPESSGGSSGGSDKKYSIGLAIGTNSVGWAVITDEYKVPSKKFKVLGNTDRHSIKKNLIGALLFDSGETAEATRLKRTARRRYTRRKNRICYLQEIFSNEMAKVDDSFFHRLEESFLVEEDKKHERHPIFGNIVDEVAYHEKYPTIYHLRKKLVDSTDKADLRLIYLALAHMIKFRGHFLIEGDLNPDNSDVDKLFIQLVQTYNQLFEENPINASGVDAKAILSARLSKSRRLENLIAQLPGEKKNGLFGNLIALSLGLTPNFKSNFDLAEDAKLQLSKDTYDDDLDNLLAQIGDQYADLFLAAKNLSDAILLSDILRVNTEITKAPLSASMIKRYDEHHQDLTLLKALVRQQLPEKYKEIFFDQSKNGYAGYIDGGASQEEFYKFIKPILEKMDGTEELLVKLNREDLLRKQRTFDNGSIPHQIHLGELHAILRRQEDFYPFLKDNREKIEKILTFRIPYYVGPLARGNSRFAWMTRKSEETITPWNFEEVVDKGASAQSFIERMTNFDKNLPNEKVLPKHSLLYEYFTVYNELTKVKYVTEGMRKPAFLSGEQKKAIVDLLFKTNRKVTVKQLKEDYFKKIECFDSVEISGVEDRFNASLGTYHDLLKIIKDKDFLDNEENEDILEDIVLTLTLFEDREMIEERLKTYAHLFDDKVMKQLKRRRYTGWGRLSRKLINGIRDKQSGKTILDFLKSDGFANRNFMQLIHDDSLTFKEDIQKAQVSGQGDSLHEHIANLAGSPAIKKGILQTVKVVDELVKVMGRHKPENIVIEMARENQTTQKGQKNSRERMKRIEEGIKELGSQILKEHPVENTQLQNEKLYLYYLQNGRDMYVDQELDINRLSDYDVDHIVPQSFLKDDSIDNKVLTRSDKNRGKSDNVPSEEVVKKMKNYWRQLLNAKLITQRKFDNLTKAERGGLSELDKAGFIKRQLVETRQITKHVAQILDSRMNTKYDENDKLIREVKVITLKSKLVSDFRKDFQFYKVREINNYHHAHDAYLNAVVGTALIKKYPKLESEFVYGDYKVYDVRKMIAKSEQEIGKATAKYFFYSNIMNFFKTEITLANGEIRKRPLIETNGETGEIVWDKGRDFATVRKVLSMPQVNIVKKTEVQTGGFSKESILPKRNSDKLIARKKDWDPKKYGGFDSPTVAYSVLVVAKVEKGKSKKLKSVKELLGITIMERSSFEKNPIDFLEAKGYKEVKKDLIIKLPKYSLFELENGRKRMLASAGELQKGNELALPSKYVNFLYLASHYEKLKGSPEDNEQKQLFVEQHKHYLDEIIEQISEFSKRVILADANLDKVLSAYNKHRDKPIREQAENIIHLFTLTNLGAPAAFKYFDTTIDRKRYTSTKEVLDATLIHQSITGLYETRIDLSQLGGDSGGSGGSGGSTNLSDIIEKETGKQLVIQESILMLPEEVEEVIGNKPESDILVHTAYDESTDENVMLLTSDAPEYKPWALVIQDSNGENKIKMLSGGSGGSGGSTNLSDIIEKETGKQLVIQESILMLPEEVEEVIGNKPESDILVHTAYDESTDENVMLLTSDAPEYKPWALVIQDSNGENKIKMLSGGSKRTADGSEFEPKKKRKV

SEQ ID NO: 42 - protein, 1812 aa, Artificial sequence
  Synthetic polypeptide
MKRTADGSEFESPKKKRKVDPATFTFNFNNEPWVRGRHETYLCYEVERMHNDTWVLLAQRRGFLCNQAKNLLCGFYGRHAELCFLDVIPFWKLDLDQDYRVTCFTSWAPCFSCAQEMAKFISKNKHVSLCIFAARIYDDKGLCKEGLRTLAEAGAKISIMTYSEFKHCWDTFVDHQGCPFQPWDGLDEHSQDLSGRLRAILQNQENSGGSSGGSSGSETPGTSESATPESSGGSSGGSDKKYSIGLAIGTNSVGWAVITDEYKVPSKKFKVLGNTDRHSIKKNLIGALLFDSGETAEATRLKRTARRRYTRRKNRICYLQEIFSNEMAKVDDSFFHRLEESFLVEEDKKHERHPIFGNIVDEVAYHEKYPTIYHLRKKLVDSTDKADLRLIYLALAHMIKFRGHFLIEGDLNPDNSDVDKLFIQLVQTYNQLFEENPINASGVDAKAILSARLSKSRRLENLIAQLPGEKKNGLFGNLIALSLGLTPNFKSNFDLAEDAKLQLSKDTYDDDLDNLLAQIGDQYADLFLAAKNLSDAILLSDILRVNTEITKAPLSASMIKRYDEHHQDLTLLKALVRQQLPEKYKEIFFDQSKNGYAGYIDGGASQEEFYKFIKPILEKMDGTEELLVKLNREDLLRKQRTFDNGSIPHQIHLGELHAILRRQEDFYPFLKDNREKIEKILTFRIPYYVGPLARGNSRFAWMTRKSEETITPWNFEEVVDKGASAQSFIERMTNFDKNLPNEKVLPKHSLLYEYFTVYNELTKVKYVTEGMRKPAFLSGEQKKAIVDLLFKTNRKVTVKQLKEDYFKKIECFDSVEISGVEDRFNASLGTYHDLLKIIKDKDFLDNEENEDILEDIVLTLTLFEDREMIEERLKTYAHLFDDKVMKQLKRRRYTGWGRLSRKLINGIRDKQSGKTILDFLKSDGFANRNFMQLIHDDSLTFKEDIQKAQVSGQGDSLHEHIANLAGSPAIKKGILQTVKVVDELVKVMGRHKPENIVIEMARENQTTQKGQKNSRERMKRIEEGIKELGSQILKEHPVENTQLQNEKLYLYYLQNGRDMYVDQELDINRLSDYDVDHIVPQSFLKDDSIDNKVLTRSDKNRGKSDNVPSEEVVKKMKNYWRQLLNAKLITQRKFDNLTKAERGGLSELDKAGFIKRQLVETRQITKHVAQILDSRMNTKYDENDKLIREVKVITLKSKLVSDFRKDFQFYKVREINNYHHAHDAYLNAVVGTALIKKYPKLESEFVYGDYKVYDVRKMIAKSEQEIGKATAKYFFYSNIMNFFKTEITLANGEIRKRPLIETNGETGEIVWDKGRDFATVRKVLSMPQVNIVKKTEVQTGGFSKESILPKRNSDKLIARKKDWDPKKYGGFDSPTVAYSVLVVAKVEKGKSKKLKSVKELLGITIMERSSFEKNPIDFLEAKGYKEVKKDLIIKLPKYSLFELENGRKRMLASAGELQKGNELALPSKYVNFLYLASHYEKLKGSPEDNEQKQLFVEQHKHYLDEIIEQISEFSKRVILADANLDKVLSAYNKHRDKPIREQAENIIHLFTLTNLGAPAAFKYFDTTIDRKRYTSTKEVLDATLIHQSITGLYETRIDLSQLGGDSGGSGGSGGSTNLSDIIEKETGKQLVIQESILMLPEEVEEVIGNKPESDILVHTAYDESTDENVMLLTSDAPEYKPWALVIQDSNGENKIKMLSGGSGGSGGSTNLSDIIEKETGKQLVIQESILMLPEEVEEVIGNKPESDILVHTAYDESTDENVMLLTSDAPEYKPWALVIQDSNGENKIKMLSGGSKRTADGSEFEPKKKRKV

SEQ ID NO: 43 - protein, 1812 aa, Artificial sequence
  Synthetic polypeptide
MKRTADGSEFESPKKKRKVDPATFTFNFNNEPWVRGRHETYLCYEVERMHNDTWVLLAQRRGFLCNQAKNLLCGFYGRHAELCFLDVIPFWKLDLDQDYRVTCFTSWSPCFSCAQEMAKFISKNKHVSLCIFTARIFHDKGRCKEGLRTLAEAGAKISIMTYSEFKHCWDTFVDHQGCPFQPWDGLDEHSQDLSGRLRAILQNQENSGGSSGGSSGSETPGTSESATPESSGGSSGGSDKKYSIGLAIGTNSVGWAVITDEYKVPSKKFKVLGNTDRHSIKKNLIGALLFDSGETAEATRLKRTARRRYTRRKNRICYLQEIFSNEMAKVDDSFFHRLEESFLVEEDKKHERHPIFGNIVDEVAYHEKYPTIYHLRKKLVDSTDKADLRLIYLALAHMIKFRGHFLIEGDLNPDNSDVDKLFIQLVQTYNQLFEENPINASGVDAKAILSARLSKSRRLENLIAQLPGEKKNGLFGNLIALSLGLTPNFKSNFDLAEDAKLQLSKDTYDDDLDNLLAQIGDQYADLFLAAKNLSDAILLSDILRVNTEITKAPLSASMIKRYDEHHQDLTLLKALVRQQLPEKYKEIFFDQSKNGYAGYIDGGASQEEFYKFIKPILEKMDGTEELLVKLNREDLLRKQRTFDNGSIPHQIHLGELHAILRRQEDFYPFLKDNREKIEKILTFRIPYYVGPLARGNSRFAWMTRKSEETITPWNFEEVVDKGASAQSFIERMTNFDKNLPNEKVLPKHSLLYEYFTVYNELTKVKYVTEGMRKPAFLSGEQKKAIVDLLFKTNRKVTVKQLKEDYFKKIECFDSVEISGVEDRFNASLGTYHDLLKIIKDKDFLDNEENEDILEDIVLTLTLFEDREMIEERLKTYAHLFDDKVMKQLKRRRYTGWGRLSRKLINGIRDKQSGKTILDFLKSDGFANRNFMQLIHDDSLTFKEDIQKAQVSGQGDSLHEHIANLAGSPAIKKGILQTVKVVDELVKVMGRHKPENIVIEMARENQTTQKGQKNSRERMKRIEEGIKELGSQILKEHPVENTQLQNEKLYLYYLQNGRDMYVDQELDINRLSDYDVDHIVPQSFLKDDSIDNKVLTRSDKNRGKSDNVPSEEVVKKMKNYWRQLLNAKLITQRKFDNLTKAERGGLSELDKAGFIKRQLVETRQITKHVAQILDSRMNTKYDENDKLIREVKVITLKSKLVSDFRKDFQFYKVREINNYHHAHDAYLNAVVGTALIKKYPKLESEFVYGDYKVYDVRKMIAKSEQEIGKATAKYFFYSNIMNFFKTEITLANGEIRKRPLIETNGETGEIVWDKGRDFATVRKVLSMPQVNIVKKTEVQTGGFSKESILPKRNSDKLIARKKDWDPKKYGGFDSPTVAYSVLVVAKVEKGKSKKLKSVKELLGITIMERSSFEKNPIDFLEAKGYKEVKKDLIIKLPKYSLFELENGRKRMLASAGELQKGNELALPSKYVNFLYLASHYEKLKGSPEDNEQKQLFVEQHKHYLDEIIEQISEFSKRVILADANLDKVLSAYNKHRDKPIREQAENIIHLFTLTNLGAPAAFKYFDTTIDRKRYTSTKEVLDATLIHQSITGLYETRIDLSQLGGDSGGSGGSGGSTNLSDIIEKETGKQLVIQESILMLPEEVEEVIGNKPESDILVHTAYDESTDENVMLLTSDAPEYKPWALVIQDSNGENKIKMLSGGSGGSGGSTNLSDIIEKETGKQLVIQESILMLPEEVEEVIGNKPESDILVHTAYDESTDENVMLLTSDAPEYKPWALVIQDSNGENKIKMLSGGSKRTADGSEFEPKKKRKV

SEQ ID NO: 44 - protein, 1812 aa, Artificial sequence
  Synthetic polypeptide
MKRTADGSEFESPKKKRKVDPATFTFNFNNEPWVRGRHETYLCYEVERMHNDTWVLLAQRRGFLCNQAPNLLCGFYGRHAELCFLDVIPFWKLDLDQDYRVTCFTSWSPCFSCAQEMAKFISKNKHVSLCIFTARIFDDKGRCKEGLRTLAEAGAKISIMTYSEFKHCWDTFVDHQGCPFQPWDGLDEHSQDLSGRLRAILQNQENSGGSSGGSSGSETPGTSESATPESSGGSSGGSDKKYSIGLAIGTNSVGWAVITDEYKVPSKKFKVLGNTDRHSIKKNLIGALLFDSGETAEATRLKRTARRRYTRRKNRICYLQEIFSNEMAKVDDSFFHRLEESFLVEEDKKHERHPIFGNIVDEVAYHEKYPTIYHLRKKLVDSTDKADLRLIYLALAHMIKFRGHFLIEGDLNPDNSDVDKLFIQLVQTYNQLFEENPINASGVDAKAILSARLSKSRRLENLIAQLPGEKKNGLFGNLIALSLGLTPNFKSNFDLAEDAKLQLSKDTYDDDLDNLLAQIGDQYADLFLAAKNLSDAILLSDILRVNTEITKAPLSASMIKRYDEHHQDLTLLKALVRQQLPEKYKEIFFDQSKNGYAGYIDGGASQEEFYKFIKPILEKMDGTEELLVKLNREDLLRKQRTFDNGSIPHQIHLGELHAILRRQEDFYPFLKDNREKIEKILTFRIPYYVGPLARGNSRFAWMTRKSEETITPWNFEEVVDKGASAQSFIERMTNFDKNLPNEKVLPKHSLLYEYFTVYNELTKVKYVTEGMRKPAFLSGEQKKAIVDLLFKTNRKVTVKQLKEDYFKKIECFDSVEISGVEDRFNASLGTYHDLLKIIKDKDFLDNEENEDILEDIVLTLTLFEDREMIEERLKTYAHLFDDKVMKQLKRRRYTGWGRLSRKLINGIRDKQSGKTILDFLKSDGFANRNFMQLIHDDSLTFKEDIQKAQVSGQGDSLHEHIANLAGSPAIKKGILQTVKVVDELVKVMGRHKPENIVIEMARENQTTQKGQKNSRERMKRIEEGIKELGSQILKEHPVENTQLQNEKLYLYYLQNGRDMYVDQELDINRLSDYDVDHIVPQSFLKDDSIDNKVLTRSDKNRGKSDNVPSEEVVKKMKNYWRQLLNAKLITQRKFDNLTKAERGGLSELDKAGFIKRQLVETRQITKHVAQILDSRMNTKYDENDKLIREVKVITLKSKLVSDFRKDFQFYKVREINNYHHAHDAYLNAVVGTALIKKYPKLESEFVYGDYKVYDVRKMIAKSEQEIGKATAKYFFYSNIMNFFKTEITLANGEIRKRPLIETNGETGEIVWDKGRDFATVRKVLSMPQVNIVKKTEVQTGGFSKESILPKRNSDKLIARKKDWDPKKYGGFDSPTVAYSVLVVAKVEKGKSKKLKSVKELLGITIMERSSFEKNPIDFLEAKGYKEVKKDLIIKLPKYSLFELENGRKRMLASAGELQKGNELALPSKYVNFLYLASHYEKLKGSPEDNEQKQLFVEQHKHYLDEIIEQISEFSKRVILADANLDKVLSAYNKHRDKPIREQAENIIHLFTLTNLGAPAAFKYFDTTIDRKRYTSTKEVLDATLIHQSITGLYETRIDLSQLGGDSGGSGGSGGSTNLSDIIEKETGKQLVIQESILMLPEEVEEVIGNKPESDILVHTAYDESTDENVMLLTSDAPEYKPWALVIQDSNGENKIKMLSGGSGGSGGSTNLSDIIEKETGKQLVIQESILMLPEEVEEVIGNKPESDILVHTAYDESTDENVMLLTSDAPEYKPWALVIQDSNGENKIKMLSGGSKRTADGSEFEPKKKRKV

SEQ ID NO: 45 - protein, 1812 aa, Artificial sequence
  Synthetic polypeptide
MKRTADGSEFESPKKKRKVDPATFTFNFNNEPWVRGRHETYLCYEVERMHNDTWVLLAQRRGFLCNQAKNLLCGFYGRHAELCFLDVIPFWKLDLDQDYRVTCFTSWSPCFSCAQEMAKFISKNKHVSLCIFTARIFDDQGRCKEGLRTLAEAGAKISIMTYSEFKHCWDTFVDHQGCPFQPWDGLDEHSQDLSGRLRAILQNQENSGGSSGGSSGSETPGTSESATPESSGGSSGGSDKKYSIGLAIGTNSVGWAVITDEYKVPSKKFKVLGNTDRHSIKKNLIGALLFDSGETAEATRLKRTARRRYTRRKNRICYLQEIFSNEMAKVDDSFFHRLEESFLVEEDKKHERHPIFGNIVDEVAYHEKYPTIYHLRKKLVDSTDKADLRLIYLALAHMIKFRGHFLIEGDLNPDNSDVDKLFIQLVQTYNQLFEENPINASGVDAKAILSARLSKSRRLENLIAQLPGEKKNGLFGNLIALSLGLTPNFKSNFDLAEDAKLQLSKDTYDDDLDNLLAQIGDQYADLFLAAKNLSDAILLSDILRVNTEITKAPLSASMIKRYDEHHQDLTLLKALVRQQLPEKYKEIFFDQSKNGYAGYIDGGASQEEFYKFIKPILEKMDGTEELLVKLNREDLLRKQRTFDNGSIPHQIHLGELHAILRRQEDFYPFLKDNREKIEKILTFRIPYYVGPLARGNSRFAWMTRKSEETITPWNFEEVVDKGASAQSFIERMTNFDKNLPNEKVLPKHSLLYEYFTVYNELTKVKYVTEGMRKPAFLSGEQKKAIVDLLFKTNRKVTVKQLKEDYFKKIECFDSVEISGVEDRFNASLGTYHDLLKIIKDKDFLDNEENEDILEDIVLTLTLFEDREMIEERLKTYAHLFDDKVMKQLKRRRYTGWGRLSRKLINGIRDKQSGKTILDFLKSDGFANRNFMQLIHDDSLTFKEDIQKAQVSGQGDSLHEHIANLAGSPAIKKGILQTVKVVDELVKVMGRHKPENIVIEMARENQTTQKGQKNSRERMKRIEEGIKELGSQILKEHPVENTQLQNEKLYLYYLQNGRDMYVDQELDINRLSDYDVDHIVPQSFLKDDSIDNKVLTRSDKNRGKSDNVPSEEVVKKMKNYWRQLLNAKLITQRKFDNLTKAERGGLSELDKAGFIKRQLVETRQITKHVAQILDSRMNTKYDENDKLIREVKVITLKSKLVSDFRKDFQFYKVREINNYHHAHDAYLNAVVGTALIKKYPKLESEFVYGDYKVYDVRKMIAKSEQEIGKATAKYFFYSNIMNFFKTEITLANGEIRKRPLIETNGETGEIVWDKGRDFATVRKVLSMPQVNIVKKTEVQTGGFSKESILPKRNSDKLIARKKDWDPKKYGGFDSPTVAYSVLVVAKVEKGKSKKLKSVKELLGITIMERSSFEKNPIDFLEAKGYKEVKKDLIIKLPKYSLFELENGRKRMLASAGELQKGNELALPSKYVNFLYLASHYEKLKGSPEDNEQKQLFVEQHKHYLDEIIEQISEFSKRVILADANLDKVLSAYNKHRDKPIREQAENIIHLFTLTNLGAPAAFKYFDTTIDRKRYTSTKEVLDATLIHQSITGLYETRIDLSQLGGDSGGSGGSGGSTNLSDIIEKETGKQLVIQESILMLPEEVEEVIGNKPESDILVHTAYDESTDENVMLLTSDAPEYKPWALVIQDSNGENKIKMLSGGSGGSGGSTNLSDIIEKETGKQLVIQESILMLPEEVEEVIGNKPESDILVHTAYDESTDENVMLLTSDAPEYKPWALVIQDSNGENKIKMLSGGSKRTADGSEFEPKKKRKV

SEQ ID NO: 46 - protein, 1812 aa, Artificial sequence
  Synthetic polypeptide
MKRTADGSEFESPKKKRKVDPATFTFNFNNEPWVRGRHETYLCYEVERMHNDTWVLLAQRRGFLCNQAKNLLCGFYGRHAELCFLDVIPFWKLDLDQDYRVTCFTSWSPCFSCAQEMAKFISKNKHVSLCIFTARIFDDKGRCKEGLRTLAEAGAKISIMTYSEFKHCWDTFVDHQGCPFQPWDGLDEHSQDLSGRLRAILQNQENSGGSSGGSSGSETPGTSESATPESSGGSSGGSDKKYSIGLAIGTNSVGWAVITDEYKVPSKKFKVLGNTDRHSIKKNLIGALLFDSGETAEATRLKRTARRRYTRRKNRICYLQEIFSNEMAKVDDSFFHRLEESFLVEEDKKHERHPIFGNIVDEVAYHEKYPTIYHLRKKLVDSTDKADLRLIYLALAHMIKFRGHFLIEGDLNPDNSDVDKLFIQLVQTYNQLFEENPINASGVDAKAILSARLSKSRRLENLIAQLPGEKKNGLFGNLIALSLGLTPNFKSNFDLAEDAKLQLSKDTYDDDLDNLLAQIGDQYADLFLAAKNLSDAILLSDILRVNTEITKAPLSASMIKRYDEHHQDLTLLKALVRQQLPEKYKEIFFDQSKNGYAGYIDGGASQEEFYKFIKPILEKMDGTEELLVKLNREDLLRKQRTFDNGSIPHQIHLGELHAILRRQEDFYPFLKDNREKIEKILTFRIPYYVGPLARGNSRFAWMTRKSEETITPWNFEEVVDKGASAQSFIERMTNFDKNLPNEKVLPKHSLLYEYFTVYNELTKVKYVTEGMRKPAFLSGEQKKAIVDLLFKTNRKVTVKQLKEDYFKKIECFDSVEISGVEDRFNASLGTYHDLLKIIKDKDFLDNEENEDILEDIVLTLTLFEDREMIEERLKTYAHLFDDKVMKQLKRRRYTGWGRLSRKLINGIRDKQSGKTILDFLKSDGFANRAFAALIADDSLTFKEDIQKAQVSGQGDSLHEHIANLAGSPAIKKGILQTVKVVDELVKVMGRHKPENIVIEMARENQTTQKGQKNSRERMKRIEEGIKELGSQILKEHPVENTQLQNEKLYLYYLQNGRDMYVDQELDINRLSDYDVDHIVPQSFLKDDSIDNKVLTRSDKNRGKSDNVPSEEVVKKMKNYWRQLLNAKLITQRKFDNLTKAERGGLSELDKAGFIKRQLVETRQITKHVAQILDSRMNTKYDENDKLIREVKVITLKSKLVSDFRKDFQFYKVREINNYHHAHDAYLNAVVGTALIKKYPKLESEFVYGDYKVYDVRKMIAKSEQEIGKATAKYFFYSNIMNFFKTEITLANGEIRKRPLIETNGETGEIVWDKGRDFATVRKVLSMPQVNIVKKTEVQTGGFSKESILPKRNSDKLIARKKDWDPKKYGGFDSPTVAYSVLVVAKVEKGKSKKLKSVKELLGITIMERSSFEKNPIDFLEAKGYKEVKKDLIIKLPKYSLFELENGRKRMLASAGELQKGNELALPSKYVNFLYLASHYEKLKGSPEDNEQKQLFVEQHKHYLDEIIEQISEFSKRVILADANLDKVLSAYNKHRDKPIREQAENIIHLFTLTNLGAPAAFKYFDTTIDRKRYTSTKEVLDATLIHQSITGLYETRIDLSQLGGDSGGSGGSGGSTNLSDIIEKETGKQLVIQESILMLPEEVEEVIGNKPESDILVHTAYDESTDENVMLLTSDAPEYKPWALVIQDSNGENKIKMLSGGSGGSGGSTNLSDIIEKETGKQLVIQESILMLPEEVEEVIGNKPESDILVHTAYDESTDENVMLLTSDAPEYKPWALVIQDSNGENKIKMLSGGSKRTADGSEFEPKKKRKV

SEQ ID NO: 47 - DNA, 6027 bp, Artificial sequence
  Synthetic polynucleotide
atgaaacggacagccgacggaagcgagttcgagtcaccaaagaagaagcggaaagtcaagcctcactttcggaacaccgtggagcggatgtacagagataccttcagctacaacttctataatagacccatcctgtcccggagaaataccgtgtggctgtgctatgaggtgaagacaaagggcccttctcggccccctctggatgccaagattttccggggccaggtgtacagcgagctgaagtatcaccccgagatgaggttctttcactggttctccaagtggaggaagctgcaccgcgaccaggagtacgaggtgacctggtatatcagctggtccccatgcaccaagtgtacacgcgatatggccacatttctggccgaggaccccaaggtgaccctgacaatctttgtggccaggctgtactatttctgggaccctgattaccaggaggccctgcgctctctgtgccagaagcgggatggcccaagagccaccatgaagatcatgaactacgacgagtttcagcactgttggagcaagttcgtgtattcccagcgggagctgttcgagccttggaacaatctgccaaagtactatatcctgctgcacatcatgctgggcgagatcctgagacacagcatggacccccccaccttcaccttcaacttcaacaatgagccttgggtgcggggcagacacgagacctacctgtgctatgaggtggagcggatgcacaacgacacatgggtgctgctgaaccagaggaggggctttctgtgcaatcaggccccccacaagcacggcttcctggagggcaggcacgcagagctgtgcttcctggacgtgatcccattctggaagctggacctggatcaggactaccgcgtgacctgttttacatcttggagcccctgcttctcctgtgcccaggagatggccaagtttatctccaagaacaagcacgtgtctctgtgcatcttcaccgccaggatctacgacgatcagggcaggtgtcaggagggactgcgcacactggccgaggcaggagccaagatcagcatcatgacctatagcgagtttaagcactgctgggatacattcgtggaccaccagggctgtccattccagccctgggatggcctggacgagcactcccaggacctgtctggcaggctgagggccatcctgcagaaccaggagaattctggaggatctagcggaggatcctctggcagcgagacaccaggaacaagcgagtcagcaacaccagagagcagtggcggcagcagcggcggcagcgacaagaagtacagcatcggcctggccatcggcaccaactctgtgggctgggccgtgatcaccgacgagtacaaggtgcccagcaagaaattcaaggtgctgggcaacaccgaccggcacagcatcaagaagaacctgatcggagccctgctgttcgacagcggcgaaacagccgaggccacccggctgaagagaaccgccagaagaagatacaccagacggaagaaccggatctgctatctgcaagagatcttcagcaacgagatggccaaggtggacgacagcttcttccacagactggaagagtccttcctggtggaagaggataagaagcacgagcggcaccccatcttcggcaacatcgtggacgaggtggcctaccacgagaagtaccccaccatctaccacctgagaaagaaactggtggacagcaccgacaaggccgacctgcggctgatctatctggccctggcccacatgatcaagttccggggccacttcctgatcgagggcgacctgaaccccgacaacagcgacgtggacaagctgttcatccagctggtgcagacctacaaccagctgttcgaggaaaaccccatcaacgccagcggcgtggacgccaaggccatcctgtctgccagactgagcaagagcagacggctggaaaatctgatcgcccagctgcccggcgagaagaagaatggcctgttcggaaacctgattgccctgagcctgggcctgacccccaacttcaagagcaacttcgacctggccgaggatgccaaactgcagctgagcaaggacacctacgacgacgacctggacaacctgctggcccagatcggcgaccagtacgccgacctgtttctggccgccaagaacctgtccgacgccatcctgctgagcgacatcctgagagtgaacaccgagatcaccaaggcccccctgagcgcctctatgatcaagagatacgacgagcaccaccaggacctgaccctgctgaaagctctcgtgcggcagcagctgcctgagaagtacaaagagattttcttcgaccagagcaagaacggctacgccggctacattgacggcggagccagccaggaagagttctacaagttcatcaagcccatcctggaaaagatggacggcaccgaggaactgctcgtgaagctgaacagagaggacctgctgcggaagcagcggaccttcgacaacggcagcatcccccaccagatccacctgggagagctgcacgccattctgcggcggcaggaagatttttacccattcctgaaggacaaccgggaaaagatcgagaagatcctgaccttccgcatcccctactacgtgggccctctggccaggggaaacagcagattcgcctggatgaccagaaagagcgaggaaaccatcaccccctggaacttcgaggaagtggtggacaagggcgcttccgcccagagcttcatcgagcggatgaccaacttcgataagaacctgcccaacgagaaggtgctgcccaagcacagcctgctgtacgagtacttcaccgtgtataacgagctgaccaaagtgaaatacgtgaccgagggaatgagaaagcccgccttcctgagcggcgagcagaaaaaggccatcgtggacctgctgttcaagaccaaccggaaagtgaccgtgaagcagctgaaagaggactacttcaagaaaatcgagtgcttcgactccgtggaaatctccggcgtggaagatcggttcaacgcctccctgggcacataccacgatctgctgaaaattatcaaggacaaggacttcctggacaatgaggaaaacgaggacattctggaagatatcgtgctgaccctgacactgtttgaggacagagagatgatcgaggaacggctgaaaacctatgcccacctgttcgacgacaaagtgatgaagcagctgaagcggcggagatacaccggctggggcaggctgagccggaagctgatcaacggcatccgggacaagcagtccggcaagacaatcctggatttcctgaagtccgacggcttcgccaacagaaacttcatgcagctgatccacgacgacagcctgacctttaaagaggacatccagaaagcccaggtgtccggccagggcgatagcctgcacgagcacattgccaatctggccggcagccccgccattaagaagggcatcctgcagacagtgaaggtggtggacgagctcgtgaaagtgatgggccggcacaagcccgagaacatcgtgatcgaaatggccagagagaaccagaccacccagaagggacagaagaacagccgcgagagaatgaagcggatcgaagagggcatcaaagagctgggcagccagatcctgaaagaacaccccgtggaaaacacccagctgcagaacgagaagctgtacctgtactacctgcagaatgggcgggatatgtacgtggaccaggaactggacatcaaccggctgtccgactacgatgtggaccatatcgtgcctcagagctttctgaaggacgactccatcgacaacaaggtgctgaccagaagcgacaagaaccggggcaagagcgacaacgtgccctccgaagaggtcgtgaagaagatgaagaactactggcggcagctgctgaacgccaagctgattacccagagaaagttcgacaatctgaccaaggccgagagaggcggcctgagcgaactggataaggccggcttcatcaagagacagctggtggaaacccggcagatcacaaagcacgtggcacagatcctggactcccggatgaacactaagtacgacgagaatgacaagctgatccgggaagtgaaagtgatcaccctgaagtccaagctggtgtccgatttccggaaggatttccagttttacaaagtgcgcgagatcaacaactaccaccacgcccacgacgcctacctgaacgccgtcgtgggaaccgccctgatcaaaaagtaccctaagctggaaagcgagttcgtgtacggcgactacaaggtgtacgacgtgcggaagatgatcgccaagagcgagcaggaaatcggcaaggctaccgccaagtacttcttctacagcaacatcatgaactttttcaagaccgagattaccctggccaacggcgagatccggaagcggcctctgatcgagacaaacggcgaaaccggggagatcgtgtgggataagggccgggattttgccaccgtgcggaaagtgctgagcatgccccaagtgaatatcgtgaaaaagaccgaggtgcagacaggcggcttcagcaaagagtctatcctgcccaagaggaacagcgataagctgatcgccagaaagaaggactgggaccctaagaagtacggcggcttcgacagccccaccgtggcctattctgtgctggtggtggccaaagtggaaaagggcaagtccaagaaactgaagagtgtgaaagagctgctggggatcaccatcatggaaagaagcagcttcgagaagaatcccatcgactttctggaagccaagggctacaaagaagtgaaaaaggacctgatcatcaagctgcctaagtactccctgttcgagctggaaaacggccggaagagaatgctggcctctgccggcgaactgcagaagggaaacgaactggccctgccctccaaatatgtgaacttcctgtacctggccagccactatgagaagctgaagggctcccccgaggataatgagcagaaacagctgtttgtggaacagcacaagcactacctggacgagatcatcgagcagatcagcgagttctccaagagagtgatcctggccgacgctaatctggacaaagtgctgtccgcctacaacaagcaccgggataagcccatcagagagcaggccgagaatatcatccacctgtttaccctgaccaatctgggagcccctgccgccttcaagtactttgacaccaccatcgaccggaagaggtacaccagcaccaaagaggtgctggacgccaccctgatccaccagagcatcaccggcctgtacgagacacggatcgacctgtctcagctgggaggtgacagcggcgggagcggcgggagcggggggagcactaatctgagcgacatcattgagaaggagactgggaaacagctggtcattcaggagtccatcctgatgctgcctgaggaggtggaggaagtgatcggcaacaagccagagtctgacatcctggtgcacaccgcctacgacgagtccacagatgagaatgtgatgctgctgacctctgacgcccccgagtataagccttgggccctggtcatccaggattctaacggcgagaataagatcaagatgctgagcggaggatccggaggatctggaggcagcaccaacctgtctgacatcatcgagaaggagacaggcaagcagctggtcatccaggagagcatcctgatgctgcccgaagaagtcgaagaagtgatcggaaacaagcctgagagcgatatcctggtccataccgcctacgacgagagtaccgacgaaaatgtgatgctgctgacatccgacgccccagagtataagccctgggctctggtcatccaggattccaacggagagaacaaaatcaaaatgctgtctggcggctcaaaaagaaccgccgacggcagcgaattcgagcccaagaagaagaggaaagtctaa

SEQ ID NO: 48 - protein, 384 aa, Homo sapiens
MKPHFRNTVERMYRDTFSYNFYNRPILSRRNTVWLCYEVKTKGPSRPPLDAKIFRGQVYSELKYHPEMRFFHWFSKWRKLHRDQEYEVTWYISWSPCTKCTRDMATFLAEDPKVTLTIFVARLYYFWDPDYQEALRSLCQKRDGPRATMKIMNYDEFQHCWSKFVYSQRELFEPWNNLPKYYILLHIMLGEILRHSMDPPTFTFNFNNEPWVRGRHETYLCYEVERMHNDTWVLLNQRRGFLCNQAPHKHGFLEGRHAELCFLDVIPFWKLDLDQDYRVTCFTSWSPCFSCAQEMAKFISKNKHVSLCIFTARIYDDQGRCQEGLRTLAEAGAKISIMTYSEFKHCWDTFVDHQGCPFQPWDGLDEHSQDLSGRLRAILQNQEN

SEQ ID NO: 49 - protein, 1783 aa, Artificial Sequence
  Synthetic polypeptide
MKRTADGSEFESPKKKRKVDPATFTFNFNNEPWVRGRHETYLCYEVERMHNDTWVLLAQRRGFLCNQAKNLLCGFYGRHAELCFLDVIPFWKLDLDQDYRVTCFTSWSPCFSCAQEMAKFISKNKHVSLCIFTARIFDDKGRCKEGLRTLAEAGAKISIMTYSEFKHCWDTFVDHQGCPFQPWDGLDEHSQDLSGRLRAILQNQENPAPDKKYSIGLAIGTNSVGWAVITDEYKVPSKKFKVLGNTDRHSIKKNLIGALLFDSGETAEATRLKRTARRRYTRRKNRICYLQEIFSNEMAKVDDSFFHRLEESFLVEEDKKHERHPIFGNIVDEVAYHEKYPTIYHLRKKLVDSTDKADLRLIYLALAHMIKFRGHFLIEGDLNPDNSDVDKLFIQLVQTYNQLFEENPINASGVDAKAILSARLSKSRRLENLIAQLPGEKKNGLFGNLIALSLGLTPNFKSNFDLAEDAKLQLSKDTYDDDLDNLLAQIGDQYADLFLAAKNLSDAILLSDILRVNTEITKAPLSASMIKRYDEHHQDLTLLKALVRQQLPEKYKEIFFDQSKNGYAGYIDGGASQEEFYKFIKPILEKMDGTEELLVKLNREDLLRKQRTFDNGSIPHQIHLGELHAILRRQEDFYPFLKDNREKIEKILTFRIPYYVGPLARGNSRFAWMTRKSEETITPWNFEEVVDKGASAQSFIERMTNFDKNLPNEKVLPKHSLLYEYFTVYNELTKVKYVTEGMRKPAFLSGEQKKAIVDLLFKTNRKVTVKQLKEDYFKKIECFDSVEISGVEDRFNASLGTYHDLLKIIKDKDFLDNEENEDILEDIVLTLTLFEDREMIEERLKTYAHLFDDKVMKQLKRRRYTGWGRLSRKLINGIRDKQSGKTILDFLKSDGFANRNFMQLIHDDSLTFKEDIQKAQVSGQGDSLHEHIANLAGSPAIKKGILQTVKVVDELVKVMGRHKPENIVIEMARENQTTQKGQKNSRERMKRIEEGIKELGSQILKEHPVENTQLQNEKLYLYYLQNGRDMYVDQELDINRLSDYDVDHIVPQSFLKDDSIDNKVLTRSDKNRGKSDNVPSEEVVKKMKNYWRQLLNAKLITQRKFDNLTKAERGGLSELDKAGFIKRQLVETRQITKHVAQILDSRMNTKYDENDKLIREVKVITLKSKLVSDFRKDFQFYKVREINNYHHAHDAYLNAVVGTALIKKYPKLESEFVYGDYKVYDVRKMIAKSEQEIGKATAKYFFYSNIMNFFKTEITLANGEIRKRPLIETNGETGEIVWDKGRDFATVRKVLSMPQVNIVKKTEVQTGGFSKESILPKRNSDKLIARKKDWDPKKYGGFDSPTVAYSVLVVAKVEKGKSKKLKSVKELLGITIMERSSFEKNPIDFLEAKGYKEVKKDLIIKLPKYSLFELENGRKRMLASAGELQKGNELALPSKYVNFLYLASHYEKLKGSPEDNEQKQLFVEQHKHYLDEIIEQISEFSKRVILADANLDKVLSAYNKHRDKPIREQAENIIHLFTLTNLGAPAAFKYFDTTIDRKRYTSTKEVLDATLIHQSITGLYETRIDLSQLGGDSGGSGGSGGSTNLSDIIEKETGKQLVIQESILMLPEEVEEVIGNKPESDILVHTAYDESTDENVMLLTSDAPEYKPWALVIQDSNGENKIKMLSGGSGGSGGSTNLSDIIEKETGKQLVIQESILMLPEEVEEVIGNKPESDILVHTAYDESTDENVMLLTSDAPEYKPWALVIQDSNGENKIKMLSGGSKRTADGSEFEPKKKRKV

SEQ ID NO: 50 - protein, 1783 aa, Artificial Sequence
  Synthetic polypeptide
MKRTADGSEFESPKKKRKVDPATFTFNFNNEPWVRGRHETYLCYEVERMHNDTWVLLAQRRGFLCNQAKNLLCGFYGRHAELCFLDVIPFWKLDLDQDYRVTCFTSYSPCFSCAQEMAKFISKNKHVSLCIFTARIFDDKGRCKEGLRTLAEAGAKISIMTYSEFKHCWDTFVDHQGCPFQPWDGLDEHSQDLSGRLRAILQNQENPAPDKKYSIGLAIGTNSVGWAVITDEYKVPSKKFKVLGNTDRHSIKKNLIGALLFDSGETAEATRLKRTARRRYTRRKNRICYLQEIFSNEMAKVDDSFFHRLEESFLVEEDKKHERHPIFGNIVDEVAYHEKYPTIYHLRKKLVDSTDKADLRLIYLALAHMIKFRGHFLIEGDLNPDNSDVDKLFIQLVQTYNQLFEENPINASGVDAKAILSARLSKSRRLENLIAQLPGEKKNGLFGNLIALSLGLTPNFKSNFDLAEDAKLQLSKDTYDDDLDNLLAQIGDQYADLFLAAKNLSDAILLSDILRVNTEITKAPLSASMIKRYDEHHQDLTLLKALVRQQLPEKYKEIFFDQSKNGYAGYIDGGASQEEFYKFIKPILEKMDGTEELLVKLNREDLLRKQRTFDNGSIPHQIHLGELHAILRRQEDFYPFLKDNREKIEKILTFRIPYYVGPLARGNSRFAWMTRKSEETITPWNFEEVVDKGASAQSFIERMTNFDKNLPNEKVLPKHSLLYEYFTVYNELTKVKYVTEGMRKPAFLSGEQKKAIVDLLFKTNRKVTVKQLKEDYFKKIECFDSVEISGVEDRFNASLGTYHDLLKIIKDKDFLDNEENEDILEDIVLTLTLFEDREMIEERLKTYAHLFDDKVMKQLKRRRYTGWGRLSRKLINGIRDKQSGKTILDFLKSDGFANRNFMQLIHDDSLTFKEDIQKAQVSGQGDSLHEHIANLAGSPAIKKGILQTVKVVDELVKVMGRHKPENIVIEMARENQTTQKGQKNSRERMKRIEEGIKELGSQILKEHPVENTQLQNEKLYLYYLQNGRDMYVDQELDINRLSDYDVDHIVPQSFLKDDSIDNKVLTRSDKNRGKSDNVPSEEVVKKMKNYWRQLLNAKLITQRKFDNLTKAERGGLSELDKAGFIKRQLVETRQITKHVAQILDSRMNTKYDENDKLIREVKVITLKSKLVSDFRKDFQFYKVREINNYHHAHDAYLNAVVGTALIKKYPKLESEFVYGDYKVYDVRKMIAKSEQEIGKATAKYFFYSNIMNFFKTEITLANGEIRKRPLIETNGETGEIVWDKGRDFATVRKVLSMPQVNIVKKTEVQTGGFSKESILPKRNSDKLIARKKDWDPKKYGGFDSPTVAYSVLVVAKVEKGKSKKLKSVKELLGITIMERSSFEKNPIDFLEAKGYKEVKKDLIIKLPKYSLFELENGRKRMLASAGELQKGNELALPSKYVNFLYLASHYEKLKGSPEDNEQKQLFVEQHKHYLDEIIEQISEFSKRVILADANLDKVLSAYNKHRDKPIREQAENIIHLFTLTNLGAPAAFKYFDTTIDRKRYTSTKEVLDATLIHQSITGLYETRIDLSQLGGDSGGSGGSGGSTNLSDIIEKETGKQLVIQESILMLPEEVEEVIGNKPESDILVHTAYDESTDENVMLLTSDAPEYKPWALVIQDSNGENKIKMLSGGSGGSGGSTNLSDIIEKETGKQLVIQESILMLPEEVEEVIGNKPESDILVHTAYDESTDENVMLLTSDAPEYKPWALVIQDSNGENKIKMLSGGSKRTADGSEFEPKKKRKV

SEQ ID NO: 51 - protein, 1783 aa, Artificial Sequence
  Synthetic polypeptide
MKRTADGSEFESPKKKRKVDPATFTFNFNNEPWVRGRHETYLCYEVERMHNDTWVLLAQRRGFLCNQAKNLLCGFYGRHAELCFLDVIPFWKLDLDQDYRVTCFTSFSPCFSCAQEMAKFISKNKHVSLCIFTARIFDDKGRCKEGLRTLAEAGAKISIMTYSEFKHCWDTFVDHQGCPFQPWDGLDEHSQDLSGRLRAILQNQENPAPDKKYSIGLAIGTNSVGWAVITDEYKVPSKKFKVLGNTDRHSIKKNLIGALLFDSGETAEATRLKRTARRRYTRRKNRICYLQEIFSNEMAKVDDSFFHRLEESFLVEEDKKHERHPIFGNIVDEVAYHEKYPTIYHLRKKLVDSTDKADLRLIYLALAHMIKFRGHFLIEGDLNPDNSDVDKLFIQLVQTYNQLFEENPINASGVDAKAILSARLSKSRRLENLIAQLPGEKKNGLFGNLIALSLGLTPNFKSNFDLAEDAKLQLSKDTYDDDLDNLLAQIGDQYADLFLAAKNLSDAILLSDILRVNTEITKAPLSASMIKRYDEHHQDLTLLKALVRQQLPEKYKEIFFDQSKNGYAGYIDGGASQEEFYKFIKPILEKMDGTEELLVKLNREDLLRKQRTFDNGSIPHQIHLGELHAILRRQEDFYPFLKDNREKIEKILTFRIPYYVGPLARGNSRFAWMTRKSEETITPWNFEEVVDKGASAQSFIERMTNFDKNLPNEKVLPKHSLLYEYFTVYNELTKVKYVTEGMRKPAFLSGEQKKAIVDLLFKTNRKVTVKQLKEDYFKKIECFDSVEISGVEDRFNASLGTYHDLLKIIKDKDFLDNEENEDILEDIVLTLTLFEDREMIEERLKTYAHLFDDKVMKQLKRRRYTGWGRLSRKLINGIRDKQSGKTILDFLKSDGFANRNFMQLIHDDSLTFKEDIQKAQVSGQGDSLHEHIANLAGSPAIKKGILQTVKVVDELVKVMGRHKPENIVIEMARENQTTQKGQKNSRERMKRIEEGIKELGSQILKEHPVENTQLQNEKLYLYYLQNGRDMYVDQELDINRLSDYDVDHIVPQSFLKDDSIDNKVLTRSDKNRGKSDNVPSEEVVKKMKNYWRQLLNAKLITQRKFDNLTKAERGGLSELDKAGFIKRQLVETRQITKHVAQILDSRMNTKYDENDKLIREVKVITLKSKLVSDFRKDFQFYKVREINNYHHAHDAYLNAVVGTALIKKYPKLESEFVYGDYKVYDVRKMIAKSEQEIGKATAKYFFYSNIMNFFKTEITLANGEIRKRPLIETNGETGEIVWDKGRDFATVRKVLSMPQVNIVKKTEVQTGGFSKESILPKRNSDKLIARKKDWDPKKYGGFDSPTVAYSVLVVAKVEKGKSKKLKSVKELLGITIMERSSFEKNPIDFLEAKGYKEVKKDLIIKLPKYSLFELENGRKRMLASAGELQKGNELALPSKYVNFLYLASHYEKLKGSPEDNEQKQLFVEQHKHYLDEIIEQISEFSKRVILADANLDKVLSAYNKHRDKPIREQAENIIHLFTLTNLGAPAAFKYFDTTIDRKRYTSTKEVLDATLIHQSITGLYETRIDLSQLGGDSGGSGGSGGSTNLSDIIEKETGKQLVIQESILMLPEEVEEVIGNKPESDILVHTAYDESTDENVMLLTSDAPEYKPWALVIQDSNGENKIKMLSGGSGGSGGSTNLSDIIEKETGKQLVIQESILMLPEEVEEVIGNKPESDILVHTAYDESTDENVMLLTSDAPEYKPWALVIQDSNGENKIKMLSGGSKRTADGSEFEPKKKRKV

SEQ ID NO: 52 - protein, 1783 aa, Artificial Sequence
  Synthetic polypeptide
MKRTADGSEFESPKKKRKVDPATFTFNFNNEPWVRGRHETYLCYEVERMHNDTWVLLAQRRGFLCNQAKNLLCGFYGRHAELCFLDVIPFWKLDLDQDYRVTCFTSWSPCFSCAQEMAKFISKNKHVSLCIFTARIFDDKGACKEGLRTLAEAGAKISIMTYSEFKHCWDTFVDHQGCPFQPWDGLDEHSQDLSGRLRAILQNQENPAPDKKYSIGLAIGTNSVGWAVITDEYKVPSKKFKVLGNTDRHSIKKNLIGALLFDSGETAEATRLKRTARRRYTRRKNRICYLQEIFSNEMAKVDDSFFHRLEESFLVEEDKKHERHPIFGNIVDEVAYHEKYPTIYHLRKKLVDSTDKADLRLIYLALAHMIKFRGHFLIEGDLNPDNSDVDKLFIQLVQTYNQLFEENPINASGVDAKAILSARLSKSRRLENLIAQLPGEKKNGLFGNLIALSLGLTPNFKSNFDLAEDAKLQLSKDTYDDDLDNLLAQIGDQYADLFLAAKNLSDAILLSDILRVNTEITKAPLSASMIKRYDEHHQDLTLLKALVRQQLPEKYKEIFFDQSKNGYAGYIDGGASQEEFYKFIKPILEKMDGTEELLVKLNREDLLRKQRTFDNGSIPHQIHLGELHAILRRQEDFYPFLKDNREKIEKILTFRIPYYVGPLARGNSRFAWMTRKSEETITPWNFEEVVDKGASAQSFIERMTNFDKNLPNEKVLPKHSLLYEYFTVYNELTKVKYVTEGMRKPAFLSGEQKKAIVDLLFKTNRKVTVKQLKEDYFKKIECFDSVEISGVEDRFNASLGTYHDLLKIIKDKDFLDNEENEDILEDIVLTLTLFEDREMIEERLKTYAHLFDDKVMKQLKRRRYTGWGRLSRKLINGIRDKQSGKTILDFLKSDGFANRNFMQLIHDDSLTFKEDIQKAQVSGQGDSLHEHIANLAGSPAIKKGILQTVKVVDELVKVMGRHKPENIVIEMARENQTTQKGQKNSRERMKRIEEGIKELGSQILKEHPVENTQLQNEKLYLYYLQNGRDMYVDQELDINRLSDYDVDHIVPQSFLKDDSIDNKVLTRSDKNRGKSDNVPSEEVVKKMKNYWRQLLNAKLITQRKFDNLTKAERGGLSELDKAGFIKRQLVETRQITKHVAQILDSRMNTKYDENDKLIREVKVITLKSKLVSDFRKDFQFYKVREINNYHHAHDAYLNAVVGTALIKKYPKLESEFVYGDYKVYDVRKMIAKSEQEIGKATAKYFFYSNIMNFFKTEITLANGEIRKRPLIETNGETGEIVWDKGRDFATVRKVLSMPQVNIVKKTEVQTGGFSKESILPKRNSDKLIARKKDWDPKKYGGFDSPTVAYSVLVVAKVEKGKSKKLKSVKELLGITIMERSSFEKNPIDFLEAKGYKEVKKDLIIKLPKYSLFELENGRKRMLASAGELQKGNELALPSKYVNFLYLASHYEKLKGSPEDNEQKQLFVEQHKHYLDEIIEQISEFSKRVILADANLDKVLSAYNKHRDKPIREQAENIIHLFTLTNLGAPAAFKYFDTTIDRKRYTSTKEVLDATLIHQSITGLYETRIDLSQLGGDSGGSGGSGGSTNLSDIIEKETGKQLVIQESILMLPEEVEEVIGNKPESDILVHTAYDESTDENVMLLTSDAPEYKPWALVIQDSNGENKIKMLSGGSGGSGGSTNLSDIIEKETGKQLVIQESILMLPEEVEEVIGNKPESDILVHTAYDESTDENVMLLTSDAPEYKPWALVIQDSNGENKIKMLSGGSKRTADGSEFEPKKKRKV

SEQ ID NO: 53 - protein, 1783 aa, Artificial Sequence
  Synthetic polypeptide
MKRTADGSEFESPKKKRKVDPATFTFNFNNEPWVRGRHETYLCYEVERMHNDTWVLLAQRRGFLCNQAKNLLCGFYGRHAELCFLDVIPFWKLDLDQDYRVTCFTSWSPCFSCAQEMAKFISKNKHVSLCIFTARIFDDKGECKEGLRTLAEAGAKISIMTYSEFKHCWDTFVDHQGCPFQPWDGLDEHSQDLSGRLRAILQNQENPAPDKKYSIGLAIGTNSVGWAVITDEYKVPSKKFKVLGNTDRHSIKKNLIGALLFDSGETAEATRLKRTARRRYTRRKNRICYLQEIFSNEMAKVDDSFFHRLEESFLVEEDKKHERHPIFGNIVDEVAYHEKYPTIYHLRKKLVDSTDKADLRLIYLALAHMIKFRGHFLIEGDLNPDNSDVDKLFIQLVQTYNQLFEENPINASGVDAKAILSARLSKSRRLENLIAQLPGEKKNGLFGNLIALSLGLTPNFKSNFDLAEDAKLQLSKDTYDDDLDNLLAQIGDQYADLFLAAKNLSDAILLSDILRVNTEITKAPLSASMIKRYDEHHQDLTLLKALVRQQLPEKYKEIFFDQSKNGYAGYIDGGASQEEFYKFIKPILEKMDGTEELLVKLNREDLLRKQRTFDNGSIPHQIHLGELHAILRRQEDFYPFLKDNREKIEKILTFRIPYYVGPLARGNSRFAWMTRKSEETITPWNFEEVVDKGASAQSFIERMTNFDKNLPNEKVLPKHSLLYEYFTVYNELTKVKYVTEGMRKPAFLSGEQKKAIVDLLFKTNRKVTVKQLKEDYFKKIECFDSVEISGVEDRFNASLGTYHDLLKIIKDKDFLDNEENEDILEDIVLTLTLFEDREMIEERLKTYAHLFDDKVMKQLKRRRYTGWGRLSRKLINGIRDKQSGKTILDFLKSDGFANRNFMQLIHDDSLTFKEDIQKAQVSGQGDSLHEHIANLAGSPAIKKGILQTVKVVDELVKVMGRHKPENIVIEMARENQTTQKGQKNSRERMKRIEEGIKELGSQILKEHPVENTQLQNEKLYLYYLQNGRDMYVDQELDINRLSDYDVDHIVPQSFLKDDSIDNKVLTRSDKNRGKSDNVPSEEVVKKMKNYWRQLLNAKLITQRKFDNLTKAERGGLSELDKAGFIKRQLVETRQITKHVAQILDSRMNTKYDENDKLIREVKVITLKSKLVSDFRKDFQFYKVREINNYHHAHDAYLNAVVGTALIKKYPKLESEFVYGDYKVYDVRKMIAKSEQEIGKATAKYFFYSNIMNFFKTEITLANGEIRKRPLIETNGETGEIVWDKGRDFATVRKVLSMPQVNIVKKTEVQTGGFSKESILPKRNSDKLIARKKDWDPKKYGGFDSPTVAYSVLVVAKVEKGKSKKLKSVKELLGITIMERSSFEKNPIDFLEAKGYKEVKKDLIIKLPKYSLFELENGRKRMLASAGELQKGNELALPSKYVNFLYLASHYEKLKGSPEDNEQKQLFVEQHKHYLDEIIEQISEFSKRVILADANLDKVLSAYNKHRDKPIREQAENIIHLFTLTNLGAPAAFKYFDTTIDRKRYTSTKEVLDATLIHQSITGLYETRIDLSQLGGDSGGSGGSGGSTNLSDIIEKETGKQLVIQESILMLPEEVEEVIGNKPESDILVHTAYDESTDENVMLLTSDAPEYKPWALVIQDSNGENKIKMLSGGSGGSGGSTNLSDIIEKETGKQLVIQESILMLPEEVEEVIGNKPESDILVHTAYDESTDENVMLLTSDAPEYKPWALVIQDSNGENKIKMLSGGSKRTADGSEFEPKKKRKV

SEQ ID NO: 54 - protein, 1783 aa, Artificial Sequence
  Synthetic polypeptide
MKRTADGSEFESPKKKRKVDPATFTFNFNNEPWVRGRHETYLCYEVERMHNDTWVLLAQRRGFLCNQAKNLLCGFYGRHAELCFLDVIPFWKLDLDQDYRVTCFTSWSPCFSCAQEMAKFISKNKHVSLCIFTARIFDDKGRCKEGLETLAEAGAKISIMTYSEFKHCWDTFVDHQGCPFQPWDGLDEHSQDLSGRLRAILQNQENPAPDKKYSIGLAIGTNSVGWAVITDEYKVPSKKFKVLGNTDRHSIKKNLIGALLFDSGETAEATRLKRTARRRYTRRKNRICYLQEIFSNEMAKVDDSFFHRLEESFLVEEDKKHERHPIFGNIVDEVAYHEKYPTIYHLRKKLVDSTDKADLRLIYLALAHMIKFRGHFLIEGDLNPDNSDVDKLFIQLVQTYNQLFEENPINASGVDAKAILSARLSKSRRLENLIAQLPGEKKNGLFGNLIALSLGLTPNFKSNFDLAEDAKLQLSKDTYDDDLDNLLAQIGDQYADLFLAAKNLSDAILLSDILRVNTEITKAPLSASMIKRYDEHHQDLTLLKALVRQQLPEKYKEIFFDQSKNGYAGYIDGGASQEEFYKFIKPILEKMDGTEELLVKLNREDLLRKQRTFDNGSIPHQIHLGELHAILRRQEDFYPFLKDNREKIEKILTFRIPYYVGPLARGNSRFAWMTRKSEETITPWNFEEVVDKGASAQSFIERMTNFDKNLPNEKVLPKHSLLYEYFTVYNELTKVKYVTEGMRKPAFLSGEQKKAIVDLLFKTNRKVTVKQLKEDYFKKIECFDSVEISGVEDRFNASLGTYHDLLKIIKDKDFLDNEENEDILEDIVLTLTLFEDREMIEERLKTYAHLFDDKVMKQLKRRRYTGWGRLSRKLINGIRDKQSGKTILDFLKSDGFANRNFMQLIHDDSLTFKEDIQKAQVSGQGDSLHEHIANLAGSPAIKKGILQTVKVVDELVKVMGRHKPENIVIEMARENQTTQKGQKNSRERMKRIEEGIKELGSQILKEHPVENTQLQNEKLYLYYLQNGRDMYVDQELDINRLSDYDVDHIVPQSFLKDDSIDNKVLTRSDKNRGKSDNVPSEEVVKKMKNYWRQLLNAKLITQRKFDNLTKAERGGLSELDKAGFIKRQLVETRQITKHVAQILDSRMNTKYDENDKLIREVKVITLKSKLVSDFRKDFQFYKVREINNYHHAHDAYLNAVVGTALIKKYPKLESEFVYGDYKVYDVRKMIAKSEQEIGKATAKYFFYSNIMNFFKTEITLANGEIRKRPLIETNGETGEIVWDKGRDFATVRKVLSMPQVNIVKKTEVQTGGFSKESILPKRNSDKLIARKKDWDPKKYGGFDSPTVAYSVLVVAKVEKGKSKKLKSVKELLGITIMERSSFEKNPIDFLEAKGYKEVKKDLIIKLPKYSLFELENGRKRMLASAGELQKGNELALPSKYVNFLYLASHYEKLKGSPEDNEQKQLFVEQHKHYLDEIIEQISEFSKRVILADANLDKVLSAYNKHRDKPIREQAENIIHLFTLTNLGAPAAFKYFDTTIDRKRYTSTKEVLDATLIHQSITGLYETRIDLSQLGGDSGGSGGSGGSTNLSDIIEKETGKQLVIQESILMLPEEVEEVIGNKPESDILVHTAYDESTDENVMLLTSDAPEYKPWALVIQDSNGENKIKMLSGGSGGSGGSTNLSDIIEKETGKQLVIQESILMLPEEVEEVIGNKPESDILVHTAYDESTDENVMLLTSDAPEYKPWALVIQDSNGENKIKMLSGGSKRTADGSEFEPKKKRKV

1. A polypeptide comprising a variant of a native cytosine deaminase (CD) domain, wherein the variant CD domain comprises a sequence at least 90% identical to amino acids 198-384 of SEQ ID NO: 48, and comprises P200A, N236A, P247K, Q318K, Q322K substitutions relative to SEQ ID NO: 48.

2. The polypeptide of claim 1, further comprising a Y315F or a N244G substitution relative to SEQ ID NO: 48.

3. The polypeptide of claim 1, further comprising H248N, K249L, H250L, G251C, F252G, L253F, and E254Y substitutions relative to SEQ ID NO: 48.

4-9. (canceled)

10. The polypeptide of claim 1, further comprising L234K, F310K, C243A, C321A, and C356A substitutions relative to SEQ ID NO: 48.

11-13. (canceled)

14. The polypeptide of claim 1, wherein the CD domain is a chimpanzee, gorilla, monkey, cow, dog, rat, mouse, or human APOBEC3G deaminase domain.

15. The polypeptide of claim 1, wherein the polypeptide further comprises a Cas9 domain that has nickase activity.

16-20. (canceled)

21. The polypeptide of claim 15, wherein the polypeptide further comprises a uracil glycosylase inhibitor (UGI) domain.

22-23. (canceled)

24. The polypeptide of claim 1, wherein the polypeptide further comprises a nuclear localization sequence.

25. (canceled)

26. A nucleic acid comprising a nucleotide sequence encoding the polypeptide of claim 1.

27-32. (canceled)

33. A host cell comprising the nucleic acid of claim 26.

34-36. (canceled)

37. A viral vector comprising the nucleic acid of claim 26.

38-43. (canceled)

44. A composition comprising the nucleic acid of claim 26 and a nucleic acid encoding a guide RNA.

45-53. (canceled)

54. A composition comprising the polypeptide of claim 15 and a guide RNA bound to the Cas9 domain of the polypeptide.

55-57. (canceled)

58. A method for targeted modification of a selected DNA sequence, the method comprising contacting the DNA sequence with a polypeptide of claim 15 and a nucleic acid comprising a guide RNA (gRNA) sequence targeted to the selected DNA sequence, where the gRNA complexed with the polypeptide and directs the polypeptide to the selected DNA sequence, wherein the targeted modification is the deamination of a deoxycytidine within the selected DNA sequence.

59. (canceled)

60. The method of claim 58, wherein the selected sequence comprises a CC motif.

61. The method of claim 60, wherein the targeted modification is the deamination of the second deoxycytidine within the CC motif.

62. The method of claim 58, wherein the selected sequence comprises a DCYD motif or a DCCYD motif, wherein D represent A, G, or T, and wherein Y denotes the T>C mutation.

63. (canceled)

64. The method of claim 58, wherein the selected sequence comprises a CCCA motif, wherein the targeted modification is the deamination of the third deoxycytidine within the motif.

65-66. (canceled)

67. The method of claim 58, wherein the contacting is in vivo in a subject identified as having a clinical condition, wherein the selected DNA sequence is associated with the clinical condition, and wherein the deamination corrects a point mutation in the selected DNA sequence associated with the clinical condition.

68. (canceled)

69. The method of claim 67, wherein the clinical condition is hereditary pyropoikilocytosis, cystic fibrosis, or holocarboxylase synthetase deficiency.

70-72. (canceled)
